United States Patent Application Publication US 2023/0106033 A1 - sequence listing, part 5

SEQ ID NO: 84 - DNA, 27648 bp, Clostridium beijerinckii
atttaaatcagatgcatttgtaaatcacactcttaaatttgatatctatagttaattcttagatattttcattattcttattctgagttttatctctttaagtttaaacacaaaaaatatataatatatatattgaaaaaataatacttcatcataattctaaaaatattacaataattttatccgtaattttgaattatgaaatgtgcattgcaaaatatataacaaaactttagcctaggcctatacatataactcacagaaattagtaatataattttgtgataaatattttaatggtatttcgtagtaaaaatattcattacttcattagatttaaacataagcctagtttcagataggagaaaataagaattatgaattttattaatcattttaaaactataactaaccataaactattagttatgaaatattgttttaaagtaggtttatataaacaaggatttcttcatgatttgtcaaagtactcattagtggagttttcagctgggataaagtattataaggggtatgcaagtcctaatggtgttcaaaaagctgttgaaggatattcatcagcatggctacatcataaaggtaggaataagcatcatttcgagtattggattgattatggagtaaatgaagcagaaggtcttaaaggaatgaaaatgcctgttaattatgttgtagaaatgtttatagacagggtttgtgcttcaaaaaattatttaaaagaaaagtatactgatgaaagtcctcttagttattacgaaaacagaaaacattattatatattacatgaagatgtacgtgctcttttggaaactctgcttaataaacttgccaatgaaggagagaataaaacttttttatatgttaaaaacaacattctgaaaaatacagaaaaattttgtaataaataaccgaactgcccttctagctgtaacaaaagtttttataaaaccttcctgtaatatacatattaataattactttaagctgagtttttataataattataaatcctcagcttacttcaggttgtttttttctagtgttatatggaatactattctatatttgattttttgagcattcacttgattaacatcttatctatgcttatcatatttatattaatctattattgtccaaatatctaacgcaagtgaacgaatattaatattagtatgacccctatataatcttaaacgatgtgtacagtcatctctccacaataaagtgcttccagcgacttcaagtaaagaaagagcaagatattgggcttcatagcagttttcagaccatattgcatctacaatttgtaacattgtctctggattgcaataccctttagaatcttttagattttttaaaatttctttatatacgttattcataaaatatggttgctctttaatacaatttgcaatattgtttatatagacaatagattcatctacattattccaatcaatagctgctagataaaatcttgctaaaacacattttagtgtttcattggatgcaaggcagtcgataattcccatatataagtcagtaagttttattcgtgtaaggtttggtaaagctataagtctatccgctaatttcattaaacgctgcctgtgtggtaaatctctttcgttatcagcattccaatcatcacttattattgcactagataactccttaaatatgtctacaataaatttattaacttcaccatcacgacatgtttctatcaaaacattcattgctgccttccatctggtagtatcctcaagattagtaatagcctttgaagcagtaacagcaattatatcttcatttccatctgtccagtttctcatagcactaaaagcgtctcttccaacctctgcatctatatgattcgctattttaattatgagttctaaatatcgagacctatattcttcggggagttcataaggcaattgatgtaacagactttttacaacatcaccttgagatgaagatgtcattgcacttaaaatattccacccacgttcatcatctaaaaattgtctcgctgcatgtcctatagcaattatcacatctttatgcaaattacttttttcaaactcatttataagcagtaaaatactctcaccagtcttacaagtcccaagtaatctaatagcttcttttctaacagtaattttaagcgtctctctttttaaaagctccttaagcattgaagtaactaattctggattcattttacgaatgcatctaggtatagaatacattgctacacgagctctatccccatctaaattttccaatagaattgaaagtgccttttcaggctcttgtgtaagtgataatccatgaagtgccgcttctattattgccacttctttatcctgtaaaaattcaactattttatttgaagtaaaatcaggcattcctgcaattattcttatggctcttgaacgctcccaaataccacgtttagaatcaaatacaattttttctagcataattcctaaagcattttgttgacgaggaagccacctattaaatccattctcagctggtacaacataaattgttttaccagttaaaaacctgcctttaataacacatccagaaataaatgggtctagccattcctgacgtctatagtgtaaatgtaaaaatacttcatttattgtaatagctgatttatctaaagacagcaattctttaactcttttatcacgtgtttttttatttgcgagccaatgctttactgcttgcactgctatagaccctggttttgccattattgcatcctttaacaaaccttggagttttactatgttccatccccttttccctaatgaagttgctaaagaaatcacaaagctgtaattttctcttttattggcttcaacagctaacgtataaagttcttcaaagagtattttttctacacctttaggtaaatttttatcaagtgctggtaacgtaagctgtcctgtctttttagccctctttataattgtacttatagagaatttaaaaatctcactctgaggatttgatgcattgtatttcataagattaaatgctaatttttgtgctgctgaaagtgttccaaatgaagtatctctagcttcaatgatactatcaacaagtaaagtgagttcttttgtattatcatctttaaaaatagaaggagggcaattagaaagttcactaaaagtagcatttcgcacaggatcttgatcatttctaatatgacttaaaaacattaatgtatcatttacaccttttcttgataatgctgtactcttaattagctgtacaagtgctcttgtacgttcatctgcacttgatgattgcgccgctttttgaagaatcttccttgaagtatcaatatgacgacatgcagtaatcataatggtcctttccttgttatcatatatttctcgaagacccagcatcctagatgcttccttatcacgtaattcatttggtagttcatatagtacagcttctgaaaaagttcgtactctgcgcttatcttcttcgtatacagcttcaaaaatttctttcctatttgaaggtgccatataatgaagcaattttgctatatgtgaaggactatcagctagcaattttgcaattccaatccattggttgtttgataaataattttttcttttcaaaatactagctggtacgccattggaaagcagttcttttcttgtttcatttgtagtcagtaacatatataccttatcaggatttatacgaattaacgtacctaactctctttttaatcctaaatatattacattcgttggacctaggtttattgcacaatctaatataaaatctgcttttgatatacataatgtttcaattgcagatgcaaatctataccaaacataaatccttttctcagttggtgctttctctaaagatgacttaaaatattctaaaactatatccgaatgacgaaccgccaatttgtaccaattaactactgcatatcctatatctgaaatccacttagtaacggtttcttcagaacacgctggtaataaaatagccgcttctttggctccccattttgaatacacaaaaggtaataatttttctgccaccccttggcgatttatggctgtaacactatgcaataatttgcgacggcaatcgtaagataaatctacaatttcaccttcaatatcgctatctgatgctaattttgctaaaagccctaccgccttatttctaatattaggtgcaggatgctttaatgctaataatataatcttagactcctttattacaccagctccaactaatgcaaggcttgcttcataagcgcctccttctaatagtgaataaagcaattttgaatattgttttgattcattatctcggcctaatgttgcaattctatttgctctatctgaatatcctagtgaatccaattcgttaagtaaattctttttatccataatatctttactaaaaaacataagtcacctctttttattctttaatcacatcctacttttagatgtatttttttaaccactgtttgatagcttgtgattgttcctctgtatgaaagtcatgttcactaccaattgatacggttaaatcactattaaatttttttgaaaaattatctataacctcatgactttgcaaattatcttccgatccataaataattgcagtaggtatattccatttatcaattgggtgctcttttacatatctgtaataatcccatgaaagggtttcaataggagtagatatctcctttttttctctaagtaactcttctgtaacattgaaccatttgaacattttgcatataagatgctccatatcaacaattggtgattgaaatatgcatttctttattggaaggttcttatatgcgtgcaaactgaaatacgcgccaagactgcacgcaaataagtttatttctttccaattttcttgtacatatgctccaattttttcgagatcatgtactccattccaaacattgcatagataatttttatttttcctttcaccatgttctgggagatcaaaacttagaacctgatatcctctttctgatgctatctgtgaaaactcatgtgcactttctttgctagacatttttccatgaacaaatatatatattttgtctgaaggttctccccataagatcgctggaatattatctatttctattttactggtggtttccataatggcgcctccataaatgtagtttcttttatattaggaagaatatcatatatggagcaattcatctgcttttcaaaatattctttcatttcaaatgttgcattccaacgttctactgtaaatggaaatgttccatagcgtcttgtcgtattaacaaatcgcttttctaacatacaaaatccttgagcgtcagcaagtgaatcacaaagaattaataatctatcatagtcatcataagttaaatcattaatatattttctaacaaattcactttcttcatcactcatatcattttgtcctatttctttatcaaaatcaggaatcggaaatgaatgtgtcaaacaaattcttcctacttcatcccaacccttttccaacataaatttatatccgtcaatgccatgtcttcttgcacttatgccgtatcttctacctatatcatgaagaagtcctaacacataagctttgtctggattaagattactacatttttcagcaatcatttgcgctgctaatccaacatttatagaatgctctgtccatggtccttgatttaattgtcctgctatttctaattctttttcagccacttctctacttggaaacatattatcctcctaaatgtatcatataaattctaatttattatccttatttcaattgcttaaatcactatttaatactctatgaatattatgtttgtttataagtaaattatagcatgttttgtaaatgttatactattatgttttctagtagtacattttttatttactgcatcaaatattaattagatcatttatatttatcgctaaatacaccaaaaataaatatttaatcctctaaatttttagattatattatttctcaaaagcttttcaacatctctgagccccgatgtttcctataaattgttaactttttttattcttaacttcgttcatttttaaattgtaaaaaagttttatttgaaactatgttcctttaaaagaatgtttaatggaagctttaaaaatttctttatttttaacaaggtttaaattatgatataccatataattaaatcccggtcgtattatatttttaaagcttaaatataataatatgctaagaaacaatattccaatttcaattaagtttccgtcagatactaagtatgctatacacagcaaaggaataaatattattatataagcaactatatgtatcgctttccatacagatcttctttcatctcgaaacttaatgcttactaatctatctatatagattgtgcttagaatggtaaatataaaaattattataagatcatgttatacctccataacaagaaaatatcacactattcatatattgttttgaataatgtgatattaaaaacatatatcaactttttaagtttttgcactaatatactacattttactataattgtttattgattacaaatatgtttatttttttatatagaataacattcaaagtagattctatttactaattggaaagcaaacctcagtaacaaattcttctggacttttaacgctttgaggtccattcaaatagatatcgaagggtgctccattatatttatagccattatcttcaatccattttacaactttagcataagcttctccaagccttgaataaggcccaataaaagttgtggatgcaaccaggcctcctgcaagttcttttatattttcatttttctctgtattcaccctgctatttacgggaacacaaacttcacaatctgcattttccacatcaaattcctgcttatcatgataaattgtcattactggccccgatggcttaagattcatcctgaagatgtcctcaaatacctttcctataacactacttatattgctcatacttgttattgttctcctgctgataacaattaacgactttctgtccttcaattcaacttttaaatccttcttagcttccataatattacctcctaactcaatcttcttaattttttgttcaatagaattcttaagtttcaagctgttttgaacttccttattaatctcagcaattttgtcctgtaaaaactttttaagcaagtcagcatcttccttatccataatggctttaatttcttctaacttcaatccatattcttttaattcagatatagaaagaagttttaaaacctgttcatatgcataatatctgtactgagtatctctgtccacatacataggttttaacagattaatctcatcataataacgaagtgtcttagttgaaactctcccaattttagaaaactgtccaattgtgtacacaattaattctccttcctatcgacaatcatagtataaaccttcctgttaaggttaaagtcaagaggtaattttattatttatattttaattttatcttacgaaaaaatattgtcttaattctttatttaattctactaagttcatctaaaaatgctggtttctttctatataaagctattaattcattaactattgggatttgactttgctttcctgcaatctttttatattttttaattattctgcatacatttttataatgacttctatttgtagcacgacttgcttcaaacattatgtattttttataaatttctataacttcatctttaaacttaccaattaaaatttctgcataactatctctacttgtaggattctctattacatattcaattagttcatccaaatcattttcttctaatattatctgaagaaaaatactcttagcttgataaccattataatttttaagttcttgttttaaatcattatagaaacctgtttcattttctgtgatttcttttaattctttataatattcaaaaatgccttgaagtaaaagttctttagctaagtctctttgttcatacctcatagaaaattctttgtatgccgtatatcttattttttcccattttaaaattaatccggcaaatctaatcttttcgctatttcttctatatgaacattttaagtttcacaacaacctccataagttttagaaataaaatacttatgaatgcattatgtcactaatagagctataataattctaatccttttaagaaaatctattaataacataataatagtctagctttgcctgcttagagaaattgaaacttgtgttatcttaataagtctatttcaaatccatattcatgaaatgtaaggtttgcatcgattatttcttcatagattccatctacttgcataaatccgttttttaggtataaatttatggctggtttatttatattgacaacaaaaagtcttaaatatttaacgttcatatgcttagttagtgtaatggcatgcttaagcattatactgccaattccttgtcttgaataatcaacattaactccaaaacgttcaatatataatgctttagagtttggattcccccattttacacaactttctccagcatttgattcacataatgcaaaggagccaactatattattatctttctcaattagcaaataaaggcgattattttcaatatccttgctgaaaaactcacacggatatatttcgtcccaaattggtatgttgtttctgtccatatcatcaattatgtttccatacacagctttgagttttggtaaatcatttaaattagccaatcttaaattcatatcaattcacctccaaatgactatttataatgttcaatattaaatgtttacaaaatcagtattcaacggtacattttccattctgtcaccctatatatagaacaaatttcaaattttaactcctgttttccagattaccaaactgaaatttatatatttggactatttttaaacttaacacaatataaatttagctaatcgaaaaacttccctttataaaaattctcattttcaagtttcttagccgtcattctaaatataacgcagccatctgggcatacaacatctttgctatacttgctatctccaccaatattctctaaatctccaccacttctgacggcctccatgattgggaacataatcatcattacttttgaacagataccttgtccatccttatttataggacaaccataggtgcaagtatacttatcaccaacttcctcgccatttcggcaatacctttctgtgtggtcacttcgaagaaatcctgtcacctcaatttcccattcgtactcttcatcataccattttttcataattaccctccaaatataacttatatgtttattattatttaacacttatttgccatttttgaatcagaagatattagacgccctcttcatttacgtgcataattaaacttactaaaacaaccaatacaatttatcttttgatattttaaatccaagtttcttttgtaaagctattgattttttattttctacttcaacttgtgaaaatggtactaaaccattctcaagtgttttgtttaccatataactttcaagtattgttccatatcctaaacgtctgtattcaggaaatatctctaatagtcctatgctcccttctaaatgatttcctataaatcctatgagcacgttgttcttatatcctccaaatatattcctaccttttaacagtttttcaatttcattattagataatttattataatgtcttaagataatttctatttgattctgttttaattctcttagttctagctctgattttatatcgatctttgctttatcaatatatactgcttgaaaacattcaagttcttcgtttaacccaaacttacttaatatataattggttataaatttttgatgtacaacgattaaattgcaattggatattccatttattagttcttgtcctttttcaaaattgtctacagatatcatatatgcattacttttttgctcttttatcagtaccccatctatttcagcatacaaaatttctgccgtatctctacgtatcggctcaatcattcccatatgtaacaatggattttttattaaatatttaattgcagcagatttcatacttctttaccctttaaccttttcgctatttcttctatatgagtattatcagttccacaacaacctcctaaaattttaggaacaaaatatttatataacaccatcatatcatcagcaagactaacaccatcagaaaatttcaaatcagaagaattatctaattcttctggggataatggcgaagtgtttgcttgtattccatgaaatctttctttaactaattttgttttattgaaagaataagataaagatttttttaatattactggatgaacacagtttaccatatagcaaatcggctttttaattgtagcattatccatatgtaaaattgcatcattaatggtagttccatctattagtcgcccatcatccctaatcataaaactaattatatatggcaattccgtactttccatagcctttgccattccagtagcttcagacaacgcaggcataataccagcaaatagaaaatctactcccgattctttaaataaatttgcctgccatgaatggaattcctgtgcgtcatctattgataagacatcactagctttatatgcatctcctttacatcccattaaaccgcctacaaacatatctatttttgcattactccttattttttgtaggaatctcacattatcttctattattttttcagtaaattcagattctaagacacgatttttattggctcttcttgtaggtgttgttacaataaagggaaattcatatttttcagcagttttcagatattctgtataaatactacacatggcttgtcttgaatcagaatcataaactaaaccagccatcccaaccttatcatcaaatataatattaaattctctttttaatctttctcctaaagctccctccattaaaatagatgaagatttatcaaagcaagtttgaaagtccatatatactcctctttacatttactctttttaaaatttttcacgctattgactagatatttaacttacagccactcattaaatttcatatataacaatagaatattttatattaagtctactactgattatatttattatataaacactgcttatacgcttattttgatgctaatgaaaaaataataccatataaaacacatcctaaaggaaataatataaatatgcttcctaaaattattgaacctatattaaatgaaaaatttactgtactgtcttttgttttcatctgtttcaagtatattttattcatcgctatgcctgtgccaccgataattatcaaacctgttcctataaaacagataagagcaatgataattccaattatagctgcaaagaatggaaagaaaattataaatcccattatatcacctctcctataatttatttaaaatgaatactcctgcaatcaaataacacaatgttatcaaaatgccaacccacatgtgtatagcagaaagtaaccaataactaacttttacttttttatctgatgtatcaaagcgtttactcatcttcatccctttatatcctctaattattgcaataacagcaaaaaataaagtggctataaatgctaaaatgatgattacatttcctaattttatcattcttttcccccttttatctaaatagtattcttattttttcaagcttaaagtaatgcttatactcttcataaaattattctatcccaagtaattcagaacttttatgatctaataatgtatcatctatatcaaagaaaatcatctcttacctccatttgtcaaaaactattatattacatcgtctcatgttccatccaattctcactatgattactacattctgcgcaacttagcgaaatgcatatccattcaaaaccattaacccaatcttcttctgaaaaagaatcatcgttactgacacattcgtcgataaaatcctgttttccttgcgaataaatttccattgatattacgaaagcatcttctttacatttttcacaaattactttcttaaataattggattctatctaaagaatcatacttacatacaaaaccgttccatccatgctttccggcatcaaaaatactaatttctttattacatttttggcatgttgcctttacaatcattttgttgttactttgataaacattaaagttctcagtaccacaagaacattttaatttcccttttactttatattcgctgttattggaatcagctaattgaaaagactctttaatatgactaggaataggatagttcattttattctttctcctctacaaattactatttataatattcagcattaaattagaatctataattcaaatatcataaaactatttatatcttggatattctggcagtaagtcaattagctttactgaccttccttgattatcaagtaatatttcaatgttatctgaatcttttccaagatgcatcataaattctctgcatgcgccacaagaaggtataactttaccatccttataaacagaaacgactttatctacttcgttttctccatgtgtgagcattgttgataaagcatttctctctgcgcacattcctaatgaactatttgtatcaatacaaattcctgtataaatatttcctttttttgttagcacagctgaagcaacgcttccaacccacatagtacttgaaatttcatgtggacttattacattcatagcttctttataaagctttttccatatttgttccatattgctctccttaatctttaatttagtatttataataatacccttcaatatctctcgtattctgctgttccgatggaactttattcttttctcttttcataaactcaggaaaatcttccattcttcaatcactcctataaattttaatttctactttactttataacgtctcgatagattatattaactatttcatttaagcttaattctttatgtaagcacacttctgaaatagcatccgataaatctttttcgttccaccattctctcatttctttctctccaaattcatgtgaattggacttttgcttatgacgatttaaagtttcctcaaatggtatatcaaaataatatgcaaagatttgattattaaattcatctgataaatcttgaaataattttttataccactttgaatttaaaattccttctaaaattactatattacaatgactctttccatatagtacaagttcaaatattaattcacctactttttgattggatccatcttttgcaaataggatgtcccttctaacaacatcttgcgaaattagcattgtgttttgtccgaattttttctgcaaagcttttcctgtagtagtcttaccacttccagaattgcctcttagaattattaacttcgccactctttaccactccattccccagtgtctttccgttttaagttaatcaaaatagcgaccatatgtaactaattatagcatattatgtaaatggaatactaattaaatattaacgacaatcagttctaatttatttttttataaaaataacaacactaaatatctaaaaaaattagtgttgtccattacaaagcaaattaaaaccatgaagtatcattataagatacctcatggtttcataatctttaaaaaatagtgttgttaaactatcatatctaacattgtcttttcattaataccatcttcagttgaaattgaatatgatatatcatcctctttccatgttgctaagttatactcttcatttttgtttccttgaagagttacgtctatcccatttacttttactgtagtcttgacttggtaggtattataatctccacttatattatcagtgcttttacctgctctgaaaaccatattgctattaccattgttataatctacttgtatcagttcatttgatataacacttacactttctactttaaatccagtaggcaatgtttttaattgactcactttcaaattcaatgctttttccgcttcatctaatgtcttatattcttgactataacctacatttttgtccattacaaccgatgtactagagacactatcatctgtattatcttctgatattttattttcttttacatcttctggagctgttttttgatctacgcttgttggatttctttcttctttattattaatatcatcgttatgatttgtttttgaagaagtatttgaattttctatagccttattatcagtagctttattatcattatttttattctcgggtgtctgcctcttcttttcctctgatcctgagttagattgtgagctatcttttctttcctgtccagcttttgagacattattggtatttttgttcacatgattactgccattattatagttattatcatttttattattatttctattattttgatttacagctatctcttctttatgatcattatcagatgcttctttactatcattattatagatcaattcactatcatcactagattttaagtcattattcttatcctcatgattttcttccacttcagtctgttctaaatcattagacgaatgtttgaagagcataggataacttttagctacacttaaacatataagtattgcaccacaggctgccgccatttgcatatttcttttaacattatatttctttacttttggcatagtagtttcaacttttatttctttttcttcattgttatcatttttattttcagccaaaacattttggagtattcttttttttatatcatcattcatcactattttatttagttcttctttatatttcttactcaaaatcatactcctccttcagctctatttttaacatatttcttcctctgctaagtaatgatcttactgtagcttctttcttatttactatatttgatatttcaaccgtagtatagccttcataataatataaatgaataatttctctatatttcagtggaagtttcataacctgatttaaaacattgttatctttatattcatcataatagggcatatcagttaactctacatgctttttaaaccatactgatttcaacttatttttgcatatatttctggtaacacaaataagccaatgctttttgtgatcgtcgctttcaaatatctctatatttttaagcaattgtacaaaaacatcttgaacagcatcttctgcatcgtatatatttttcatatatgaatatgcaagcctcagcagcatatctccataatgatctaaatcttgtgaaataatttcatccgtacgcaatgaaacatctttcattaaaaaactcatccttccatccagtagcacaacaatgtattgtagatattcaactttaaaactaaatttatgtggtaacttaccgaaatcataaatattttgttccgaaaagctatgaaaatatcgccgaagattctaaggtgtagatttcaccattttagcaactaaatatctttatctaataaataccatatgaaacgttatagtattgcttaaatctatatttcaaactgtttatccatagtcccaaaattaactcttccttattattcatgtctctacttatgttacttgttatttaaatctctttctaatacaagttttaattaacttaatttattaaattgtaattgttgtaataatatgtaataaaaattatttgctagaatatataatcaaaaacttggttaatatgtatctatatttttttacaaaacctgttttgtacctctagatagaaaccagatacatatttgctatggtgttacttgaaatttatcttaataaatatccttagatagaggttgtcctagatattgcatctctaaaacttgtttatgacatatgcataaatagataaaaccttcttcttcgaacattccagtaaaaatttcatcaatccatatgaagaaatatgtattgaatttctatcatttgaggcacaaattaggtctttgtgttgattttctgtataactaaaaagtactttttataatattaataatatcctcttgtttcataccatcatttagtgagatagaatatgacatattatttacgctccaaacggcaactttaataagattgtcatctccttttacttttacattgattccgtttatatttacagtattattgattttgtagttgttataatcaccacttatatcataagttccttgtcccattctaaatatgatgtcattttgtttgtttacatagcatatttgaaataaatctcttgatatagtatttatatattttatattgtatttacctaataattcttttggcactgtaatcttaaattttaatgctttttgtgcttcgtctatagtatcaaatctctcaataggacttattatatcatctgcatcttcaggtttatttactacagtagcagctggtttaccatcccattttccattttcatctactttatatccatctggggttactgtgcctgcagccatttctccattatttaataaatagtaccaattgccattagtttgaacccatcctctttgcattatgccattattattcatgaaataccacttattatttattaatttccatcctactgctaactccccattagctgaataaatccattgtccatctttatctcttacaaaaaagcttcctactgttttttgattactgaatagaaaattataaaaattaattggaacatacaccatattatcctctattataggttctgcacctaattcatgcatcatagttaatcctattgctttgctgcttgagtaataataactatcttgtcccacataaacatttgtcttaattgtaccattatctaagcttataactttattatccttatctggctcaactttaaacccaagactctctgccgtaaattttagcggaaccataatttttcccttatatattgaaactccgtttcttccaatttcaatattttttccacatattgctaccttgttgatgtcaacatccttaggtgcatagtttgatattggaacagtatcatcaataatattcgctggattagatttgtgtcttgatatatcatctgctgcaaatgcttgagctgacatccccacaattgttactgctgttaataaacctatcattaattttttcataatcttatcttctccttctaagctcccacaatctaatattgtatttatttttatgtgcttgcatcttaatttttcattttaggcacttgaaagaaaataacaagtccaaaattgccatggtatatcattcgccaagaaagcggatatcactcatagtggaccggacatattagtgttatctgcctaaaaagcatgattgaatatagactggcagatggactagttatttttttgattgcctttatattagtaatacaatccaacttagagaagtgttgcaaaaaaataaaaatttttataaaaaatcttggaatcataaaaaaacataacttatatttaaaatataatacaaaaaactctcagtttacaaacataagaaaagaaattcataagtttatccttattaatatatcagcatcctacataacctcttttcatttttataactatctttgattaaattcacattttcctattgtactatatttaccttttctccatcacttaataaattttggccttcagtaatgacatctatgccatcttgcactttgcctgttacttctgtaaatttttcatttgaaattcctgtttcaactgatatctttttaaccacgccattatcaactgcataaagataatttacaccattctccattttgattgtttcatttggaaccatcaggatgttgtccttattttcagctggtaatgatattttagcaaacatacctgcctgtatattgttattagtattatcaattttaaccttcacaatgtagaaattatttttagaacttgtatttgggctgatattatctattactccaactatttttgaatctggtaatgcatttatagtaactggtacagatagacctactttaattttctcaagcatcttatcaggaacatttatttctgcacttagactattataatctataagagtaactgatcctgattgcgcacttgcaagttgtcctacttctacagctttttctgacacaactccatctattggtgcagtaacggtagcgttacttatttgattttgcacggcactcactcctgcttgtgcttgttcaagctgtgcttcagcagcttttgtagcttgaggccctgacttgctctttaatagctctaagctatcttgtgcattttttaagtctatagctattgcatcatattgagcttttgcgtcatccaaatcctttttagctactgcttgtgctgaatacaaagtttgtgctctgtcataactgtcttttacactattatattggatttgtaactttcctaccaactgttccgcttgcaataattgctgtgtaaacccggagtcgcttgttctttctaagttagcactagctgcactcactccagcctctgcctgctcaagttgtgctgcataatctgttgtatccaaggtaaataatgtttgacctacactaactttatatcccacctttacatccacagtcgcaactcttcctcctgctttcggcaaaaccattacctcttttgctggctttaggttacttgcatattctacaattgtagaaatagttccagttgttatcttttgagtttttacatttttaacatcctgcattacttctacaggtttctttttggcaaggatagaaataattatggccacaataatcactaaaactatccctattattaaaagctttttatttttctttaaacccttaaacttcataggtgctgcccccctctaggttttgatttttcttctttttaaaagatactactccttttaaatcatccattaatgtataaataattggtaatacaattggtgaaagtattgttgatgcaaccattcctccaatgattactatagccatactctttttcatttcagttccttcacccatggataaagcaactggtaacatagaaacaatcatggtagcacttgtcatgattatcggtcttaatctagtagcaccagattctataagagcatctcttaaattcattcctctcttcataagggtattagtataatctataagtaatgtaccatttttagatgctaatccttctaacataattaatccaattattgacattaaatttaaagtctgtccagttagagccagtaaaccaaaagctcctataatagcacaaggtagtgccatcattcttataaatggagttaagaaggactcataaagcactactaaaatcatataaacaagagctaaggatgcacataaagcaagtccaagagaagaaaaactttccgccatctgtttttgatttcctccaaagcttatactatatccatcaggaaccgaaagagcctttagtttagcattaatatcatcggtaacttctccaagaacccttccttgaatattagcttcaacagtaaccatatcctgtttatcttctctagatatagaaggggcactatctattttttgaatagaagcaacttgactaagtggaatttgctgccctaaggaatttgtaattttcaaagacttaagatcttcagcactctttatttgtccgttttcaaatttaagtgttatatcattttcctcattctttgatctgtatactccaacattggttcctgcaagagccattctaacaacacttcctatatttgtagtagaaatattgtactgagtagccgcaaggttatctatattcaccctaagttcactgcttcttgaacttgtagaattacttatatcagtgattcctggtactgtatttagtaacttttcaacttcattggataaatctcttatagtatctgaatcatttccttttattttaattgatacaggcttaccactaccaccagacgaagatgactctgctacatttaaatctactccagacatatttttaccaaatctgcgaatctcacttgcaagttcactttgactttttttacgttcatccttaggaactaggttaatgaaaatctgagcaatggatttatctgcagttgcttctccatcatgtccaataagcgaaaaataattttttacttcttttgtttcttgcaaatatttttctagttcagagaccttttcatccgtttgttttaaagttgatcccggtgcaagcttcacattaatttgaagagaactctgatccgccataggtataaactctgactttattgcccccattggaataagcatgacactaaacacaactcctgcaacaactatagctaaaacttttttcctattatctaaagaccatattaaagcttttctataggtttctactagtttttcaaaagagccttctgttttagcatttattctactgaatttagaacttattattttaataaatttaaaatttattttacttaaaaatttagatttttctttttttactaacacctctttaaggctttcattttttaatagccttgaagaaagcattggtgtaattgtaaaagatacaattagagaaaacattgtagctgcaactattgtaagtccaaattctctaaacatctgcccaactaaacctgacacaagtgaaacaggggcaaatacgacaacatcgcataaagttatagctattgctgccattcctacttccttacgtccttcaatggctgcagctataggatttttccccatatccatatgccgctgtatattttctataacaactatagaatcatccaccagggtacctacaacaagagataagcccatcaaagacagcatgtttaaggtaaagtgcatctgatacatcataaaaaatgtagcaaccagcgatgttggaattgcaattaaaactactagtgaagaacggaaactacggaagaataaataaagtacaaatgcagtagttatgataccttctgcaagattatgttttatttgagtaagtgaagaattaataaacgtagtagtatccattaaaatatttacttccgttccttttggaagtgtcttttttacatcttctaattccttttttacagaatcagcaacgtctactacgtttgaatcactttgctttcctagcatcattgctatagtcttattaccaccaaatcttgttactacggtaggatctggaacttctaagtcaacttttgcaatatcaccaaggcgaattgtcactccattacctgttggtattaatagatttctaactgcatcaacgctactaaactgcccaataattctaacagattgatccaagccttcttgtttaatatctccagctggtacattaacgttggacgcctgcagtgtgcccattaaagtatcaatgttcactccataatactccatagttgctttatcaatttttatcatcaattgcttcttatcagcacctagcaatgaaatacttcccaccccaggtactttttctaatctttgctttaagatatcagattgattataaagttcctcataactggcatccccatttattgaaactatcatcataggtatggaactcatatccattttatataaaataggcttatctgcggctttaggaagtcttgcagaggcaagttcaactgccttttggacatctaaatatgcggtatttatatttgcactcattttaaaggttattgtaacagtaccatagccttctccagaagttgaatttaaaacatcaacaccgcttattccagaaactgcatcttcaattggttttacaatatctttcttaatatcttctgcactagcaccattataagttgtcattattgatataacaggaatattcatagatggcattaaatctgcccccatgcttttataacccatgattccaagtccaataaataagattactgccatccacatggctgctggtctttttactgatatttcagttatactcatttctctccccctaactctatgttcataaagtgaaacttttcatgtggagttttcttggtgcccctttatggtaaactccatctgaatttagttgaacttatccaggagcatgcagccgttatctcacacttaagcagataagtgaaagtccaaatttacaatttggtcacttagttaactcattcatgagttaacctcatcaaaaattgatttagtgtgaatcacttcctaatctgacgcaaggaagaggatcttcatatattggagagtattacggatgctagctataagataaatttttactcatcatctcgcttattctcagtatatcattatctagcaaactaaggaatatttcccatatatttaacatgaaaacagttatgttctaaataatactgattcttacatgtatgctgcatgtacccaaattagaatagctttcttcttaaatataaacatttaatgttgtatttcatattccaatatttttaataattttgatacttaatataaattctgtacattttactgctaaaaaagagagcttactacacataaactctcataaatttattatatcctctgtatctccatttttaacctaatatttcttttcaaagaagatctgctgccaaaagtgcatcatatgatgtctagataagttcaactaagattcagcttgatatttcccctcacctgaatcaagtttcacttgataaagattaatagcataaacatactaatcgttttctgatacaaccgttgttccagaaatataatcatgaatagccctatgtgatagcgtacttaaaaccaagattccggacacaattgttaaaattctggctgctattccaagatagtattcaaaataaaaaccggtcacaagagtaagtagctgtattaaataacttgttataacaattgcagctccctctatcaccatgatccctacaatttgtcttattaaaagggtttttaaatctacttctgaataatccgtttttacgattttaatcttaacaaaatgctttccaattgtctgaccatggtactttttataagggatatatacataataaattagagctacaataaaacataggccaccagctaaatatgcccatccgtttgaatatcccagactcgcaaacacatagagattgctaaacatatctcctttctttgtcaccgctctataaattaagaccgcagggaatcctgagataattcctcccaaacaccaatctatgatgtaagccagtagccgttttgatatgctcacattagacggcttcctatccacccatgatgttacttttctccatgatttatgcataaaacattcctcctattttgaatacaaataatccatggcttttttaaatcgctttaccccatcttcaacctttgagcgactacatcctaaattcatcctcaaatattttgcaccattcttcccataggtttcgcccttcataatagcaactccacccacatttactagcgcatcctgaatctgttcagatgtgaatggaactccccttccatctatccatgccaaataagtggcatctggttttttaaatttgaagtctggcagctcactcttaataaagtcctccaccagcttcatattaccacgaatatagtcatttaactcatcgatataatcatcgcattgcatataccctaccattgtggcatacattccaaatatacttgcagaattcaaaaaatctctcttcctagtatgatataaaaaatcatttctcaccgtctcatttggtattatcacatatgaaccaatcaaaccaggagtattaaatattttactggaagaagatgctgtatataactcatcataatcatagatatgagataaaagcggtatttgtttcttttgtccaatctgtatatccatatgtatctcatccgaaattatctttgtattatattttttacacaataatatcatgcgcttcatatcatcttttgaccatatcatacctgttggattatgtggagagcataaaagcaatattctgcagtcctgtacctgtttctcaaacaaatcaaaatcaatttcaaatacaccgtctttatgaattaaatcatttgataccaatatgcgatcattatcctctataactgtaaaaaacgaatcatacataggattaaatgtcaaaatcttatcttttggagaacttaacagcctgattaataatgatactgaatacataacacttgtactatataagatccaatcttcttcaatacatgtattaaatcttctcttataatgttctgttatagaggatttgaaatcatgatgattccacctggtatatccatatatctgatggctggcaacttgaagaattttttcagtaattggttttggaataataaaatcggtatctgaaattgaaaatggtattaaatctttcttatgaaagcgatcttcaatataatcccattgtgtagaataagttcccaagcgattatgaacctcatcaaaattatatttcatttatttcacctccaaaattatataatcctttgtagttttatttagtggaacacctctgccatcaatgataaccacatcatcttcaatacgaacgcccccgatattcggtacatagattccaggctcacaggacatcatcatatgttcctttaaaatggtcttacttgtagaattcaaaattggcaattcacagccatcaccgattccaagtccgtgacccaggccatgattgaaatactgcccatatccatttttcgtagtaacatccctggcagccttatccacatcactagtaataactcccgcattaatagcgttcaatcctaccagctgtgctttcaaaactatatcgtaaatttctttaatcttaggttcaggctctccgataaagcacatgcgcgtcatatctgactgataatttttatattgaatcccaaaatcaatcataattggttcatgagccttgactctgcgtccagttggcctgccatgtggaaaagcagttctctccccagttgctacaattgtatcaaaagacatttgctgcgctccttgtgcaattgaataatattggaccaaagcgcttatttcatactctgccattcctacatgaatatttgcgagcacttttttataaatatcgtctgttatatcaactgcctcttgcatgatatctatttcttcctgctgtttaacaatacgtaaattgtctatttcttcatctagcagaataatcggaacaccaatcttttcaacatctctgtattctttaactaacatctgagaagcttcaacccctaaattgtggcaatgttctttcttcaatatatcttgagctgccgatagataattacatcccattccatgagatgagtgaagaatgatttcaagatcatgttctttttctttagcctcagtcaaatatctcccatctaatataaggaaccctttatttttagtgattaagacattgcatccgctgcctgtcatagtcgataaccattttttcatagttttgcttttaataagcagagcatcaatattattatcattcatgaactcatgtattttttctatccttttagccatattatcaccatccttaaaaatgaggagctgtcacattaagaaatttaactacaatatgttgtcttaagatttaaaaatctaatccaatatatcgtgattttaggcacatgaaaataaataacaagtctaaagttgctgtgaatatttttcatcagacaaggagataaattggtctcatagcaggcctattagggcaatttgacgacgcagtattatggaaaataggctagcaaattgacttgttatttttttgattgtgccttattctttgtgctacagctccttctttttagaagtccaaatcgagatcctttaagatttcttcatcttctttagacatgttattcttatcattttccttttccttttgttgataacgtttttcatatatcttaaaaaatggataccatacaacaagtgataagattaattgaattccattagcaacaatggacattggatccatattagtaagatatccctctaagaaaacacccacataaggaggtgtaaagaatgaacagcttaacattccaaatttcatcatccaaccagggatagtccctataattccaccgcaaataacgtatggaataaaaaatataggatttaatacaattggagcaccaaataatattggttcgtttattccaaataacgcaggaattaatgcaacacgtcctatctgctttaaggcctttgatttagataataagcaccagaatactagaccaaatgttatacctgttcctgtaaagttaccaaatgcagactctggacctggggcgaagaaatgggtcatggctaatccagctttatagttagctatattttctgctaagaattgagtagaaattggagttgtaattgggctcaatacagaaggatgaattccaaagaagaataataaacattgcaacatctttaagaatgtataagacaacggattgtccatagaccctactaatggtgcaaatatgcttgtaaaaatcaatggcggcataatattaaacacattcacacacacaatacgtataattaagaagaaaccaataataataattgatattggaatcatttcaaaagatcttgaaacaaaatctggtactgaatcaggcattttaattgtgaatttcttctttttacaccagcgatataattccactgcaataattgctgcaaacattgctgcaaacagaccttttggtcctaaatatttagttataattccaccatcttttgtataatcaacagtcatcataaggaaagaaataaccgccatactaatacaccctggtacatccagcttgtaggaattggcaagatgataggccataaaagctgtagcgtataaggccatcagtgccatacctacgttgtaaggaatataaataatatcaatattagctaatatccattgagatattggattattctcaccaatcatattagggatggcttctggaatcaaacaaaaactaccaataattaacaaaggcattaaagctaccatggcttttttaatggcacttaaatgaatttctttatccatcttgttagcaagtggcgctaagtacttgctcataaaagcttcaaacttgttaaacattattcaacctccttgtataatctagttgtaacatttgatagaaaactatttatctttctaacgaacattacacctcttattatttttaatattctaatttattactttgcctacgccccgatagggaatatg

SEQ ID NO: 85 - DNA, 26624 bp, Clostridium beijerinckii
tattaatactccaataataatgctacagctaaatttttttattctaaatttaatttattttttaatatatagcttgttattatgaaataaactattatgaagattatattaaatactgtgatagatattaaaaataaattaataggccaaagagattcaatatttcttagtaaatcaggcagtctagaggatgaaaaagctatcccaatagatgaggatattgcacctgcaattaaatttaatattatgaatgccccgaaagatgaaagaattctatgcttactaaatatatgcccaattgatatagaagcataaatcatactaataaattttacaaactgaaatatcatagcaattaataattctataataattacataaatttgtattcctattttagcataaccttctgaaagagccctaaaagtttcagaaaagaattgaccaaaagccctagggtcaaatgccataataattattgaaagtatggctacaattccacttattatagtccaaaaagtagcaattgaaagtttgcttgtaatgtttgtgatggtgctcactggaagggtgttcattaaatatccttcatcaccaagcagatttttataaaatctttggataattatgaaaaaggtgactatgaatacagcagccatagtacatccgtatccaaagatgcttagtataaatgggattgaaccaaatccttgaagtttatgggatagaccagttccgataaaaattttattaatgatagcaaatgctaataatactaaatatagcggtataagggttctgccagttgcttttacctcatacttcattaattttcctaacatctaaatacctccctaaatagagcatcaacactcttcccttcattttctcttatttcatcaacacttttagttaagaatatatttccatatgatataaagactacatcatctaatattctttcaatgtcagaaataaggtgagtagatataattatagtggcattttcattgtaattagtgattattgtatttaaaatataatctctggcagcaggatcaacacctgcgataggttcatctaataaatataaatcggcctctctactcataactaaaataagttgtactttctcttttgtaccctttgacatagtttttaatttatcattgggattaatgttaagttttgataacatattataagctttctcaggattgaaattatcgtagaagtcttgaaaaaagctaataatgtctgaaactttcatccagtcattaagataagtcctttctggaagatatgaaacaattttctttgtttcaattccaggtttatttcctgatattaatatttctccatttgatggagttaaaagaccatttgccaactttattagtgtgcttttaccacttccatttggacctaaaagtccaacaattctgccacgattgatttttagatttatcccttttaatgcctcagtattagaataggttttaaataaatttttacattctaaaatagggacattatccatattgttatttgtaaaagtagacattgtatcactttcgctagagttatacaatattttattatcagcattatccattatttcatctcctttgatataatttctataagttggattgtctcttgattggtataacctattttttccatattgtgaagaaatttttcaatttgatctcttgctaaaccatttcttatatttttaatcatattaacgtcctccgtaataaatctgccactagttctttgagaaaatactaaaccagttctctcaagttctgttaatgctttctgcattgtattaggattaacagctgcatcacctgccatatctctaactgatggcaatttttcaccagctttgtatatgccagaaacgattctaagttgtatttgttccattagctgcatgtaaattggtctatcgtcattaaaatcccatgacatagtctcactccttcgtaaattgtactactgtattgttgtactaagttgttaatacaataatacaactataacttttagctgtcaagaaaaataaaatgattttttgtaggttaaataaggcaatgaaatctgttgaatattaaaaattgtggtgttataattattttcaatggtgtatatacacctgtaaaattaattaaaagaggtgtaaataaacatggcgatggatttagcaaaagaaatattaaagttaaagagagaaaagaatgctcttattcttgcacactattaccaaccaggaattatacaagacttagcagattatgtaggagattcttattatttaagtgaaatagctagagattgcaaagaggaagttataatgttttgcggggttagatttatggcagagagtgcaaaagttttatcaccgaataagactgttttaatgccatgtcctagtgcaggatgttctatggcagatatggcaagcggcaaggctttattagaactaaaggaaaagcatccagatgcttatgtagtttgctatataaattcaacgtgtaatgtgaaagctcattgtgatgtagctgtgacttcttcaagtgcattgaaaatattaaagaagatacctaataaaaagattatgtttttacctgataggaatctaggtgaatatatatcggagtttttcccagaaaaagagttcatattatgggatggattttgtaggtgccataataaggtaagcagagaagatatattgattgaaaaagaaaagcatataaatgcaaaagtattagtccatcctgaatgcacaaaggaaatcagagatattgcagattatatagggagtacaagtggaataatagattatgcgactaaagatgaaggaaccgattttataatagcgacagaagaagggattttacatgaattaaagaaaaagaatcctaataaaaatttctttataccaggagataaaatatgttgccaagacatgaaaaagacaacccttgaaaatttgtatgatgccttattaaatatgaaaaatgaaatgattatagaagaaaatgttagaaaaaaggcgttaagatcgttagaaaatatgcatttacttgcatcgcaagatgttagaagtaattaggaaaaatatgaataagtttgttgatgttctaataataggttcaggggtatcaggtctttattgtggattaaatttaaggaaagatttaaatgtcttgattgtatgcaaagataagattacttgtagtaacacttatctggcacaagggggaatatctgttgcaaaaggtgttgaggatattccactatatatagaggatactttaaaagcaggaagatacaaaaatgatttggaggctgttgaaactttaattaatgaatctatggttaacgtagaatcattgattgaaatgggaattgcttttgatagaaatgaagatggaagtttaaactttacaaaagaaggcgctcattctgtaaataggatagtccatacaaaggataatacaggagaaagtactgcaaaaattttaattgataaagtgaaaaagagagaaaatataagtgtttatgaaaatactcattttgtagatattatagaaaaagaaaataattgcattggagccatgttaataagagaatatgagcaaataaatgtttatgcaaaagctgttgtattggcaactggaggcataggtggattatttaataattcaactaatcagagaatattgacaggagatggaatagcatcagcaataagacacggtatagaattaaaggatatggattatattcaaattcatccgacagcattttatgaagaaggtgaaaataagaggaaatttttgatatcagaatctctaagaggggaaggtggaattcttacaaatataaaaggggaaagattcataaatgagcttttgccgagagatgtggtatcagaagcagtatataatcagataaaagagacagaagtaccttatgtaaatttagatataaggtttttgggaaaagattatatcataaatagattttcaaccatttatgaggaatgcttaaaaagaggaacagatataacaaaagaatgtattaaggtttctccagctcagcatttttttatgggaggaataaaagtagatttggattctaaaacatctatgaaaaacctatatgcagttggagagacaagctgtacaggagtacatggtgctaacagactcgcaagtaattcattacttgaaggacttgtattttcaagaagagctgcaatatcgattaacaacattgtggattatttggaaattaaagtttttcctgtggaaagattagaaaaatcatgggacgaattacaagaagaaaataaagagataactgttagaactataaaagaaaagggtggaaagttagatgataaattatttagttatagataaaataataaaagatgcacttattgaagattgtccaagcgatgacataaccacaaattcaatcataggagaagaaagtatctctacagtagaattgatttgcaaggaagaaggcatagttgcaggacttgaagtatttaaaagagtatttgatttattaggaaatgtggagatcgaattttataagcgtgatggagataatgtacatgtaaaagacagaattgcttttctaaaaggtaatacaagaagcttattagttggggaaaggattgctctaaatttacttcaaaggatgagtggaatagctacattaacgaatagatttatacaagaaataaaacacacaaatgcaaaattattagatacaagaaaaacaacaccaaatttaaggatattagagaaatattctgtaaagattggaggtggatgtaatcatagatttaatttatctgatggtataatgattaaagacaatcatattagtgcggctggtggaataaaaagggctatagagctaactagaaaaaattcttcatttgttagaaaaatagaggtagaaactgaaaatttagaaatggtacaggaagcactattagcaggcgcagatataataatgcttgacaatatgagtctagagatagctaaagaagcagttgaaataataggaaaaagagccttaatagaattctcaggaaatgttgaactaaataatattaaagaaatagctgaaataggtgttgattacatatctgtaggagcattaacacactcagctaaaatattggacttcagtttaaaaaacttaacattgttagaaaattaaaaattgataattaatatttctgtatcaaatgaaacggattttatatgaacattctattataataattctataagttaattgatttatttaaatgctatatttcaattattaatgtatggtcaaaaattaatgattagtgaatttaaatgagtatgaaatgtaggaggagaattttatgataagaagagttattaaaatagatgaagagaaatgtaacggatgtggtgtttgtgcaagtgcctgtcatgaaggagctataggtatagtagatggaaaggcaaaattattaagggatgattattgtgacgggcttggagattgtcttccttcatgtgaaactaatgctatttctttcgaagagagagaagcagctgcttatgatgaagaagctgtaaagataaacatggagaaaagaaatactgagcaaaagaaattagagttaaacaagaatcaaacaattcaatttggatgcccaggttcacaatctagaatgttaagccataagaagattgaagtgaaggatgcgagaactgagggtgagatagtatcacaattgaatcaatggcctgtgcagattaaacttgtttctcccaatgcagcatattttaataatgctaatttacttatagcagcagattgtacagcctatgcatatggagattttcataataagtttattagaaataaaattacattaataggatgtccaaaactagatgagggagattattcagaaaaactaacgacaattttgaagatgaatgatataaaaagtgttactgttgtaagaatggaagttccatgttgtggtggaatagaaaatgctgtgaaaaatgcattaaaggcaagtgataaaatgattccttggcaagtagtaactatttcgactaatggagaaattattgaataaaaatataaataaaataagggtatatttgcatatataaaaagttttatatgtagatatgccctataaatttataaaaatgattatttcagggtatacttaaattagaaatgggaatttatacagataagtaaaaaattatatattcattaaggtgaaatagaggatattattgctaatgtgtagaatactataatatcgagatatttaagggggagtatatatgaataaaaggaaagtgttaataccaatagacggaacagaaagaagtatgcattctttagaatttgtaaaagaaatatttcccgataaagattcaattgaaattataataatgaatgttaaagaattagtactgataaatgaaatgatagttgctgatgagataaaatttgcacaagaattgggtgaagaaatattacaagcagctaaagaaaaaatgaaagattataagacagaaacttattttacttttggatatccaggagatgaaataataaagaaagcaaatgaagaaaatataggagtaatcgttatgactaaatctactaaaagaggtttaaatcgaatgattggctcagtaactactaatgttgtcaaacgtgccaaatgtattgtaatgatagtgcctaatgatttttcaattagtattaaataagcaagttaatcagtaggtttgaaaattagaattttataggctatcttaaaaattgcattttaaggtagtctttatttttgaatatagaattttactatgtataatgatataataaagcgaaacttatttgttataatataagtatttatggaacattaagttaaagagttatattaaataataattttaaggtggaatttattttagcttatattaatacatgcggttagttcataattttcagataagggatgagaattttgaattgatataaattatataaaaattattttgttatatttaaggagtaagaaatgagagcagtttatagaaatccaagagaattagcaacatgtttaaaggacattgtggatacatattatgatgacctaatttcatatgaaaagatggaagaaagaattatgaagatagttgatgctaatagagaagctatatataaagaaaaaaatatgtcagttaagatagctaatgtcttaggagataaaagagtagatgtaattaataaagtagttgaaagtaaaactaagtcagaagtttaatgagttttgcggtttaggagtgaatttggaatgggtaagaaagtaatattaacaggagatagaccaacaggtaaattacatataggacactatataggttctttaaaaaatagagttgtacttcaagaatcaggcttatatgaaagttttataatgattgcagatcagcaggctttaacagacaatgcaagaaatcctgaaaagataagaaatagtttaacggaagttgcactcgattatttagcagttggaattgatccaagcaaatcaaatatatttgtacaatcacagataccagaactaaatgaattaacaatgcattacttaaatcttgttactttatcaaggttagaaagaaatccaacagttaagcaagaaataaaacagaaaaattttgaaaatagtattccggcagggtttcttatttatccagtaagtcaagcggctgatattacagcatttaaagcagacacagtaccagttggagaagatcaactgcctatgattgagcaaacaagggaaatcgttagaagttttaactctatatatggagaagttctagttgagccagaagcagtacttccaagttctaatgcaggaagattacctggaacggatggaaaagctaaaatgagtaagtcaataggaaattgtatatatctatctgatgatgctgatacgattaagaaaaaagtaatgtcaatgtatacagatcctaatcatataagagtagaagatccagggcaaatagaaggaaatactgtatttacttatctagatgtatttgcaactgataaaaatgctgttgaagaaatgaaagagcattataagcgtggtggtcttggtgatgtaaaagtaaaaaaatacttaaatgaaattttacaggctgaattggaaccaataagaaatagaagaattgagtttgaaaaagatatagatgcagtatataaaatgctaaaggatggtagcaataaggctagagaagtggcagctaatactcttagagaagttcgagaagcaatagggatagaatattttactggaaaataataaagtaaattcattagagggggaattcaaaatgaaagctattggaatattaaattatccagtagaagatgtgttccatatttttataaaaaatgcaaagaaagatttttcggattttaacgaagaagatgcgacaggatgtaagattcaaaagagtataaatactggtagacctaatccagtagaatgtacagttgaaataacaggatatgcaaaaaatgaaaaatatcaaattactacctcaactgattttacaacatgtatatccacatataatttcaaagggcaaaaagatggcacaaccaaattagtatttgaagaagaacagtcaacagataagttttttggatatatgtcattatggattcaaagatttatggctaggcgcgcctttaaggcaaagtataataatattgtagatgctctcaataatgaattgaagacatatgctaataataaagaacgaagcaagcctaaaaataaataataaaaatacagggttgtaaaatcaatcctgtatttttattttattaaaaaatattaaacccaattaccattattaaaaattttaatttcttcaccagctggtgtaataccagttatatttgtatctttagttcctatcataaaatcaacatgtatcaacgatacatttgaaccagatagaattgattcttctcttgtcattttttctccgttctttatgcagcaaggatatgaagaaccaagagctaaatggcatgaagcattttcgtcatataatgtattataaaaaattatatttgaatttgaaattggagaattatatggaactaaggcaacctcacctagatatcttgaaccttcgtctgtattaagaagctcagttaaaatatctaatccagtttcagcagaacaagctacaactttaccatttttaaatgttaatgaaaaattgtttattaaatttccacaatagcttaaaggctttgaactaaaaacaattccatttacgtcatccaatttaggggtagtataaacttcttctgtaggcatattagcaataaatctcagaccatcttgcgttatatcctcacccccgcaccaaatatgatcttgaactaatcctatttttaaatcagttccaagagaatttgtaaaatgaagatatttaaatttataggaatttaattctaataccttatcatgaagaagtttagtgtgcttattccatgcatctataggatcggattctttaagtctcataacagtaaaaattgcatcccataatttttcgattgcttcagatgagttagattcactaaagactttttttgcccagttttcagttggaattgaaactatgcaccaagcatttttgttggaagtacatgcactatgatatttctctaaggctgtacgtctgcctttttggtatgccgatattttatccgaatctacatctttgaaaatatctggatcagacgcggaaatactcaaaaatgctgcattgttttctacgtaatagtcatatttatctttttcaaattttggcgtaatagaaagaatttcctttgaagaattattaaatcgtatcttattgaatttttcatcattataatttataactacatcagaagcaccatatttataggcttcatctgcaagtagtcttgcaaagttactacactcaatagggctatttataactaaaagtccatctttttgtatatttacacctttgataatagcaagtttagcatatttagataaaaggttatctaacaattatatcacctcattacataatagatttttatagtactggttaatttaaaatactttgcattcggaattacggtctataattaacattataacaatttttgcaagttatctactatagtaaaataaagaatatacaaaataagaattattactaataattatggaaataatatgagataaattcattacacaacaagatacatatatactttaagttatacaatatagtataatgagtttaaataatgacttgaagtagataataatatttctagttgagtaaatttttatgttaaatttcaggaggtttctaatgaaaaaattattggttttagactcaaattcacttatgaatagggctttttatgctttgcctcctcttacaaatagtgatggaataaatactaatgccatttatggttttataaatatgctacttaaaatgaaggatgaaattaatccagatagtataattgctacttttgatttgaaagcaccaacttttagacataaagagtattctgaatataaagcaggtaggaataagatgccgccagaacttgcggaacaattcccgattattaaagaactatttaagttaatgggaattaagatatttgaagttgaaggctttgaggcagatgatttgattggaacagtatcaaaatttgctgaggacaataatacagaagtatttgtagttacaggagatcgtgatgcacttcaactagcatcagaaaaaactaaaattataattactaagaaaggtgtcagtgaaactgctgtttatgataaagaaagctttatggatgagtttgaagtgactccagagcaatttatagatgtaaaaggattaatgggagataagtcagataatataccaggcgttccaggagtgggagaaaagactgcttttaagcttataaaggaatatggatctgttgaagaagttattaaaaatatagataaaatttccgggaaaaaacttaaggaaaatttagaaaataatgttgaacaagcaatattttctaagaaattagctacaattatgagagaagttccaattgaattaaatttagaagatataagttctagtaataaagaaaatatattagaaattaagaagatgctcattaaacttgagatgaagtcaatactatctaaatttaaagatgacacagttcaggaagaatctaacattgaagtgagaaatattactacaattgaagatatgaaagcattattttcagagatgagaaatagaatttatatagattatactttaactgatgcatctaaatattctaaattaaaacttgaatatttaatattcggggaagaaaataagggtactattatagattttaaagacataagttctaagtatagtgaagaagctttaaaagttttgaaaaatcttatggaagatgataatgttaaaaaagttattcatgatggaaaaaactttgttacatttttaaataaaaatcaaattgaaataaagggatttgattttgatactgcgatagcagcttatttaattgattcatcaaagagtaaatatgaaattctagaacttgttaatcattatattggtgataatcctaacagtgaagacagcaatattaaggcaattctttgcagttacttacctatggtttatgaaaaattaaaagaaaatcttcataaggaaaatatggatcaactttattatgaagtggagcatccattaatttatgtgctttcatccatggagagtattggatttaacataaatcaaggtatgttagatgagctacagactaagtttaaaaaagaaatcgataagacacaaaaagaaatatatgaattagcggatgaggaatttaatattagttctcctaagcaactaggaaaaatattatttgaaaaattggatttaccagtcattaagaaaacaaaaactggatattcaactaaccaagaagttttagagaagctaatgaataagcatgatataatacctaaaataatgtattataggcaaatcacaaagataaattctacatatgtagaaggtttaaaaaatgtggttgatgaagatgggcgtatccattcaaacttcaatcaaactgtaactacaacaggaagactatcaagcacagaacctaatttgcaaaatattcctataaaatatgaaatgggtagagaaataagaaaagtatttataccaatggaagaaactgatatactggtttcatgtgactattcgcaaatagaattaagggtattggctcatattgctggagatgaaaatatgatagatgcatttgagcatcatagtgatattcacacaaaaactgcttcggaagtatttaaagttccgatagaagaggttacttctcttatgagaagtagagcaaaagcagttaattttgggatagtgtatggaataagtgcgtttagccttgcagaagatttaaagatcacaaagaaagaagcagaagaatacatgtctatatatttagaaagatatcctaagataaaagaatatcttgaaaatgttgtagatgaagctaaagaaaagggatatgtattgacaattttaaatagaagaagatttattccagagataaaatcttcaaataaaatagttaaggctttgggtgatagattggcaatgaatgcaccaattcaaggaagtgcagctgatataataaagcttgcaatggtaaatgtttataacagattaaatgaaaaagaattaaaaagtgaattaatccttcaagtacacgatgaacttattttaaatgtaaaaaaagatgaatttgaagaagttaaaaatttagttgcttatgaaatggaaaatgcaattaagttaaaagtagcacttgatgtagatgttaattttggagatacatggtacgatgccaaataatgtattgtggaattaaaaaaggtggtttttataaaatggttaaaattggtttaacaggtggaatcggcaccggaaaaagcactgtatcaaatattttaagtaaagaaggactaaaaataatagatgcagattctatagctaaagaagtacttgaaaataatccaaagatattagaaatggttcgggcacaatttggagcaggtttctttgactggagaggtgaatttagaaggaaagaatttggaaaccacatattcagatttcctaaacaaagaataaaatatgaaagtataattatgccgtatattaaacaatcaattgaagaaaagataaaattgcacgaacaaaagaatgaaaaaatagtaataatagatgctcctactttaattgaaaataatatgcatgaggaaatggattatattgtacttgtatatgcggataattcagttcaaattcaaagagttatgaatagagataaattaactaaagttgaaactgttagtagaataaattctcaaatgtctatggaagaaaaaaaagagtttgcgaatattattattgacaataatactgatttaatcgaattgcagaagcaagtttatgattttattgattttataaaactaatatgctaagtaaggagaatataatgaagtttctaagaaaaaccttttgtgcaatagtattcttagtagtaattgtagcagcaattggcataggttcgagatatattataaaagaaaagttttttccttataagtaccagcagtatgttgatatgtacagttcgcagtataatctagatccattgctagtactagcagttataaaaactgaaagtaaatttgatgatgatgcgcattcacataaaaatgccgtaggtcttatgcaaataacggttgatactggacaatgggcagcgaaagaaatgggatataatacattctctaaagaagacctgtataatgaagaatataatattaaaatgggatgctggtaccttaggcgtttgaatgatacttttgataaagatatggatttgacaattgcagcatacaatgcaggaccaactaatgtgcaatcatggcttgataatagaaaatactcttcagatggaaaaagtgtagattatataccttttggggaaacaaaaaaatatgttgataaggtaaacacatattatcatatatatcaatatctttatgataaaaaagacgattattttgaggcagataaggtagttgatctaatgaaaagcttcctaaatgtacattttttaagttaattattagtctctgcctaatgattaacttaaatattttatgaaaattacttgaattttaaataagaatagattatcattaagtgagtaatttatatttgcaggtgtggtggaatggcagacacgctatcttgagggggtagtgttcacatggacatacgggttcaagtcccgtcacctgcaccaaaatttgatgaatttcgtagagtttcatattttagaaacttagcgaagggcttatatataacacatatttagctatgaaaatagctaaatatgtgttatttttttgaaaaaaacgtgtattaagatacataaaatattttttgttttaaaatcttacaattgtttataatctcattactatgattaattaaatctctaaaattacaaatggtggaattgagatttgaaaagtttttaataaaaattaaggaaataaaaatatagttgttataatgaagtgggaattaaaattttaatgaaattaaaaaggtttttgtaaaaaaacatcgaataagtatttgtacaatataaatttataggatatttattatgtgattaaaaggggagtgggttttaatgttcaaatcgattaaaggtaaattagtatcacttatatctatgcttattatttcaatgattcttttaagtttgtattcaattaataacttaaatgtgattaatacagtttcagctaatatgtctacagaattaattccaggattaatccaatcagggaatataaacacgatgacatctgattttagaataatggaatatgaacatataatctcaactgacaaaaatgaaatggctcaaaaagaaaaagatatggaagcaaaaaataacgaaattcaaagcagtatgaatttatatgaaaaaacattttatgatgataaagataagcaattatttgagacagctaaaaatgattggaatcaatatttgaagatacatgagaaagttatagccttgagtagagatttaagaactgatgaggccatggaaatcatgaatggagaaggaaagaaatacttcgactcagcatcaggatcattgattgaattatctaagtataatcaagaaatgggagcgaatttttctaagcagggtagtgatatataccaaaaagtaaagaatatatctataataattatttcagtattaattattttttcaatggttatttcatttatgattatcaaaggaataatagcatcactaaaaagtttaaaggatgagttagatgcacttgcagaaaaaggtggtgacctaactcaagaaattaaagttaaatctaaggatgaaattgctggacttgcaaatagtttaaataaatttatatcaaacttaaggttaataattagtgaggtcaatgagagtactgaaaatgttataaatataaataatgatataaatagtaagatagataatctatcaagtacaatagaagaagtttcaagcagtacagagagtattgctgctggaatggaagaaacagctgcatcatcagaggagatgctagcaacatctcatgaaatcgaaaaagctgtagagggaatctcggaaaaaattcaagatggattaatatcagttgaaggaatacaaaaaagtgcagatgatgttaagaaaaatacgattgagtcacaagaaaaagcaaaggcgatatttttagagacaaaaggaggtcttgaaaaagctattgaaaactctcatattgtagctagaattagtatattatctgaatctataatcgagattgccgcacaaacagatttgttggcattgaatgctgctattgaagctgctagagcaggggatgcaggaaaaggatttgcagttgttgcagaagaggtaagaaaacttgcagaagaatctaagaatgtagttactgaaataaagaacgttactgataaagttacagaatctgtaggtgatttatcaaacaattcaagtaagcttttgaaatttatttcaaataacgtagataatgattataaatctatgatggaagttgcagataaatatagcaaggatgcagactttgttaatagtttagtttcggactttagctcaacttcagaggaacttttggcatctatacaggatattttaaaaacaatagatcaagttgcagaagcttccacagatggagcggaaggaactactgaaatagcagaaaaggtagtcgaaataaatgagaaaactaataaaataatattaaatataaatgaatctaaagagagtacaagtaaattaattaaaaaaatatctacatttaaattttaataaaagtaattgctaatttcagattctgatacatagaaggaagagataagaattgattaactattagtaattttatagcctttagcataatagctaagggcattttctttatttttttatcatacatttcatcttaattgaataggtaaatgtataatagttaatttctccagaatagaaataaagttttaagtacggaaaataattattggagaaaaaatgactcttggtcatttttgtgtgatataatctatacaaagaaatattttctgacaggagcattgaatatgaagaatataataaatatttttaaacgggatatgaagaatatatttactaattgggtggcagcgcttgttgtagtagttttaatgataataccatctttatattcattaataaatattgaggcatcctgggatccatattctaatacgaagggaatagaagttgcaattgttaatgaagataagggaacggtatacaaagaacatagtataaatttaggcaatgaattagttgataagctcaaggaaaatgatcaattaggatgggtatttgtagacaaagaaactgccagaaatggtttaacaaatgaaaagtattatgcaatgattgaaataccacaagatttttcagaggatgttacgactgtagttaagaaagacgttacaaaacctaagttaatatatactgtaaatgagaagaaaaatgttattgcatctaaaataactgatgcaggtgtaaaaagtgtcaaaactcaattagatgagaatatagcaaagagtatatcgggaataatgttcagattatgtgatgaggttggtatagatatacaaaataacagatctgagcttagaaatataatagattcagtatataaattagatgataatatgccagaaattgaaaaaatgctagatgaagcaattaatggaacaataagtgcttctgagttaatgataaaaacaaatgagcttataccaactgcagcagacactgttgatgaaactgctgaatttttaaataatacacaaagttttctaaatgaaacacaaggagatttgcagaatgaatctccaaaaattaaagaagatcttgttgaatgtgaaaatacgctggatattataggaacagagcttaaaaatattgatgaaaatatatcaccggaagtagaaaagaaagcattgttacagatattagacacttctaaagcaattagaactagttctagcgatgctaagtctagattgaagaatataaaaagagctattgataagattagtgaaatagaaatccctaaaccttcaattgacaaatcactacaaagttatgatgaaataaaaaagcttcagcaaatttttgataaacaagcagatgtaattgaaaatcaaagagatttattaaagcaagaaagtaggaccatttctaaaatcatagatagattagataatatagataataatcttgataaactaattgatagaactaataaagatattgataaattaaataatggagataaaatattggacatgcaggatcttacagatactagaaaggtattagatgatttgcataatttagtttctgatataacagataattatgattcagaaattgtaccaacaattaataaggggtttgactcaatgagcgagataattgatactgggttaaacttatcggctcaaggaaaaaaaactttgccagatgttcaagagatgttgaatactttcaagaatgcagaagatttatctaatgatgaattaaaaaaattaaaagaaaagtttccagatataaaagacaatgtacatgagcttgcgcagagattaaaaaaaatagataacaagaaagatattgatgaattattagatatgataacaaatgattggaatgctcaaagtgattttttatctagtcctgtagaaattcaggataatagattattcccatggcctaattatggatctacagtaacgccattttatacagttctttgcttatggattggtggatatgtattatcagtcctaattggaacagagtcacattctatagaaaatgataaagaattaaataagtacgagaaatattttggaaggctatcgttatttttattcataggaataggccaagctttagtagctagcttaggagcattatttattttgcattcttattcagttcatccagtaatgtttgtcttctattgtatatttataagtgttgtatttaattgcataatttatacagctgttagtctttttgggtatggaggaatagttataggtgtggtattgcttgttatacaagttgctggaaccagtggcaattttccaatagaagttaatccggcaggatatcaaaagctatttccatttcttccatttacctatgcaataagtggagttagacaaattatggcaggagtaatatattcaatattatttaaagatagcattatattatttatgtttatgatagggtcaattattattggagttttggctaaagaaccgataaatgcaaaaagaataaatattgttgaaaaattaagagaaagttcaataatgagtagttaaaataatctatattgcaatactaggggaatcaattatgaagaatatatttagaatatataaaagagatattaataaaatacgtactaactgggtagcaagacttatgattatggtaatgataattattccatctatgtactcattgataaatataaaagcttcatgggacccttattccaatacagctggaattaagattgctattattaatgaggataaaggtactgtatttaaggacaagaatataaatttaggagaagatttagttgataaacttaaggaaaatgataaattaggatgggtttttacagataaggaaaatggggagcaaggtttgctactagaaaagtattatgcaacaattgaaattccagaaaatttttctgaagacattacaacattgttagaaaaaaatattaataaaccaaagttaatatacacggtaaatgaaaagaaaaatgcgattgctcccaagatgacagattcaggtgtaaaaacagtaaaaaatgagttagatgaaaatgtaattaagacagtctcaggaatattgtttaggatatgtaacgaaagaggagttgatatacaagacaacagacctaagcttagaaaaatagttgataacatatatgagttagatgataatgtgtcagaaatcgaaacacttttagatgatgcaagcaacggaacagttaatttgaaaaatgtgttaactaaaactaatgatatgcttccaacaatatctaatgctattgattcatcaagtgattttttaaataatagtaaatcggttttagatgatactcagggaaaactatcagatatttctccaacagtaaagcaggacttaataaaatcagaaaatgtactcgataattcaagtgtagaacttaaaaatctagatgagaatgtattaccagaagtatctaaaaaggtgttattaaatgtaagggattctgctattgcaacagaagagacgattaataatgttaaatataaacttagaaatataaagaaactcattgataaattaagtgatatagaaatcaaaataccttcatttggtgataatgttccgaatatagattcgataaaattaattacagacaaactagataaacaattaaattcagtaaaaaatatgcaagatgatttgaaagatataagtaaagtgatttcagataatattgataagctagatacgattgaagataaattacaaatagtagctgataaatcggatgaagaaattaagaaaatagataatgatggattaaatgtgcaaacacttaaggatattataaaagttgtagatgaagtacatagtttggtggcagatattacagacaactatgattcagaaattgtaccaggagtagaaaagagcattaattcaactagaaaggttttagatgatagcttatctattattgatgaagggagaaatacattaccagaagtagaaaaaatgctaagtgtttcacaggatgcaaccaacttaactaacgatgaattaactagtttgaaaagcaagttaccagacgctaaaaataagattcatgaattgtcagataaaatcaaggacatggatgaagaagataaaattgatgaattattagacatgatgacaagcaattgggaaaatcaaagtgattttgtagctagtccagttgaaatagaagataatagattatttccatggcctaattacggcacagctacgactccattttataccgtactttgcttatgggttgggggattgttggcatcggctttattatcgcttgaagcacctaaatttgatgatggaacaaggattaaaccatatgaaatgtatttaggaaaactattattatttttgacagttggagtatgccaagcattagttgcaagtataggtagcttaattatgctaaaggtttatgcagttcatcctataatgtatattttttatagtatatttataagtattatatttgtaattgttatatatactgcagcaagtatactagatgatgtagggaaagccgcaattgttataatattagtacttcagatggcaggagcaagtggtaactttccgattgaagttgcaccagtattttttcaaaaattgtttccttttttgccttttacatatgcaattagtggtatgagacagattatggcgggaatagtgtattcaatattgattaaagacatagcagttttgtctatatacatgtttgtttcattaattgctggaatattattaaaaggatttatgaacagtattacaaataattttatggagaaattaaaaaagagtggaatattgagacattaatagttgttaaaataaaattattattaattggaataaatagtcaacacaactgattgctggctatttttttctgcaaaaaattaattgtatacatttatttataaaagtaaggtggcataatagaagaaaatgatataataaggttatagtttcataaaatagggggaaaaatggaaaagtataaaagactatcaaatgattttgttatgagtaaatctataatcatatatatttatatgataagtatatttttatattttatattaaaatttattgttaatgatgctagtgcacatatacctttaatttttagaatttattacataaccctaagtataattttatttgtattattaaagcaagtgagaagattttacaaaagatatgtttcgaagataataataatatttttctcattaatgatatttatatcatcgtttggatttataatgaaaatttatgatgcaaatagcttaatagaaattaaaagttatataaatttaagcagagagagcatattactaatagaaacttttgctagttatgtattaactgaatattatttggaaagaagaaaattaaagatagaaagttacggaatattaattttaattattacatgtacgttactgagttatttttctaatttgactatactctttgtgaaaattatatatacggttattgagataccagcatttataaaaatagttatgaatttaaaaaaatcaaactacttaagggaacatggatggagcatcataaaagtttacatatcctcaacggttctgatatttttaattaatatatatgcatttaacaatagccaatatataaaagatgcattaattgaagtcatacattttgcaaactttacaatgctttggaattttattatatctaggttggttaaagatccatataaggccttatcacgttcgttgaatgataaaaatggggaactagatgaactaaatcatgaaatagaattaggaaatgctaagttagagagttcaataaatttattaagaagtaaagagtatttatattcaacattatttaggtttatgccccatccaattataattctgaatgcagataatgatagaatattatttgtgaataaacaatttttaaagatttcgggaatctcaaaaaaaagagaaataataaataaaaaaataagcaattatattgattttgtaaataataatgcagaaaataaagattatgatgcaattctctatataggaaatcaaaaaaaatttataaaggcagaatttttgccttattatgaaaatgtatcatggaaattgctattgattaaagatagaacttctaaagttcttgtggatgaaataaggaaagaagttgagaataaacaaattgaagaaagtattaggagagaatttctttcaaatataagtcatgatttgaaaacgccgataaatgtaatatattcggcaatgcaggtagaaaaaatatatgttgaaaaagaagactttgatatattaaagaaatataatgatatatctaagcaaaactgtatctctttaattaaattaaccaacaatttaatagataattcaaagataaattcccattatttaacgccaagattagagaatatgaacatagttgaggtcatagaggacaatgtaatgtcattagtagaatatgtgaagttaaataatatagatttaatttttgatactaatactgaagagtgttacttggatattgatcgtgaatttatgtatagaataattctaaatttagtttctaatgctgtgaaatttactaaagatggtggacaaatatgcgtggtggtaaacgaatttgatgataaggtcaatatatctgtaaaagataatggaattggaatagatgaggaatttatatacgaagcatttaatagatattcaattggaggaaattgtaatcctgacagaaaaagtgggacaggcatagggctttttgtagtaaaacaattaattgaactacaaggcggaaaaatcgaaataaaaagaaataataatttagggacaactgtaagtattgaatttatgaaagggatatagagatgtataatggtttcttagcattggacaaaataaagataaaaattagaaacgttcagaagtatgcatttttaacggtactaataattttatgctctattcttactgataatgttaatttttatttgctattgaataatataattgcaatatctatgattttggcgtttatttatgtgtatataataagggggaagtttgtcggtaaaggttttgtagcaagattcaaagtgatatatttaatacttattatgatactagctataaatgttactgagataataatgttatttaaggatattcctaaaagttacttcatacttttttatagcatgcacgctactttagaatattgcataataaaaataggactcctggttaaaaataataatagaaagagtcttgtaatatgtatatcggaaatagtaattatcataatgcttggtattggctttaatggaggaaatggaatacataatccttatgaactatcattttttatatggagcattaccataagtgttttgttaagcataggtttgtgcatatctacagcacaagatatgctatctaaaagaaaacaatttaccattgctgaatttagacaaataatattttatattttttctatattatttaattatttgggatttatatgcctttatatgagctatgtgaaagtttctgaatttatattaattgttaaatgtattactttatataaattttatgattacataataagtaaagtagtggatggttcattaaaagaacttaataataatatcgaaaatgcaactaaaacaaagaaagaacttaactctatattaaggaaaaggaattctatattaaatgaaataagtgtaatgatcaaaaagagtggagataggaataatgaactaattgattctatttatggtggtgtatttctattttacttagataggcttcgacacataaataagaggacattaaaaactttaaacataactaatgatgagatcttaggaatagaaataaatgattttataaaaatgtattttgatataacgcttgaagatattaagagagcaggcaattatattccatgcataaaaatgaaacatactgatttcgaagttgaaatatttttggcttccatagatgaaataagcaagattctttacatacatgatataagtgaaattaaagaaaataaaaagatgagagaaattcttgaagaatacttgcaagaggatgaaataaaaaaagaatttttctctaatatttctcatgaactaaaaacgcctataaatcttatattttctgcattgcaggttaatcaaatttattttaatgaaaataatctagatggagtaaataagaatagaaagattataaagcaaaattgtttaaggcttataaggactattaataattttatagatgctaataaaatttcagaggggtatctaattccgaatctaaaaatacataatatagttaacattgtagaagaggtttcgatggcgtctaataagtacataaaattaataaataatactctgacatttgatgcacaggaagaggaaatctatgttaagtgtgataaggaaatggtaacaagaattatgttaaatattctttccaattctgttaaatatggaaagcaaggtggaaaaataaatgtgagtgtagagctttatatggataacaaagttgctataaaagttaaaaatgatggcttgaaaattgataaagaaaccattccatatatttttgataaattcactaaactgaataaaacttttaatagactaaaagaaggaagcggcttagggttatttctaactaaagccttagttgaacttcaagaaggaaatatacggctcacatcaaataatagaggaaatgaattcacaataattatgcctatggctcagcaattacatgaagataaattcaacaatgaagattgggaaacaaatttattagaagaaaagatagatatagagttttcggatatatatattgagtagaattaacttaataggaaatgaaaaaagtaagtggatatgaatttaataaatttataggtactaaaaataattacaatttgatataaataaacttgtgataaatagttttattaattaatcatagttttacataaataaacatatattaaattagttatgttaaactaattacttaaatttgaggtgtataatttatgtcagaaaagtcagggaataaaaaaaggataagaattattccattgtttgtatcaataattattccacttttaatagggtggctttcaacattattagttcctaatatgagatcaatatatgaaagcttaattaagccacctttttcaccgcctgcaatggtttttccgattgtgtggaccatactttatataattatgggaatatgctcatataaagtatatattttaaaatatgagaatatagatgtaagctctgcattatttgtttacgccatacaactattattaaattttttatggactataattttctttgggtttaagctttatgcgttagcatttttagaacttattattttgattatctttgtaattttaactataaagaggttttatgaaaagattggaaataaggcatttttattaattccttatttggcttggttagtgtatgcaggagtattgaatttttttatttggatgttaaatgaaatgtaaattgttgatattctatgtaattaatatttttaagatggttgctaagattaatatctaggtaatcatttttttatttaatgctatatttttctcatatgagttggaaaagacagagatataaaaaaacttagaatttcatggttgcctgtgattttattctgacttttaatattatttatgttttagtttataaaaaaatatatctattttgccatttaaag

SEQ ID NO: 86 - DNA, 26267 bp, Clostridium beijerinckii
ctttctgactttgtgataatttcgtggctagtagtttcagcattcgcttgcggcctggtaccttgtttgtctacacttaacttattacatcgccataataagcccaagactaactaatgactggttgctggcctttgtcatgcaggattcccacctgctatatagtaataatgaggaaggttagccctcattatcttttacgcccttgcttggcgtaccggtaagttatcacataaatctagttttaacgttggatatctataggcataaaaataaactaataaatatacatttaaaacattgcatattgtattagtttattatcttatactatttatatatcttaaacttcaataaaatttataattcctttatgtaccacacatcacaggcataatgttcagtttcaactaaaggtttttctaatctaagaaattcattcttttcgtaaaatctcttagcggcctccatattatcaaaagtttctaaataacattttttataatgtactctcgcaaattctaaagaaagacctagtaatttctttgcgatacctgagcctcttgcttcttttaaagaatacattttttgtaattcacatacatcttcagttcctaacaatggccctatcccacatcctgctactatcttcccattttcttcaactacccagtatttagatttttcaccgctatagacttggtaaaaacatcctaagttaggatcagaccaagcacagccaggtttattagccccaaattctatcaaacaagttcttattaatgattctacttgttcattatctttttcctgtatttctcttattatcataaagctttcccccactactaacttgctagtttaatttttatataataggatacaataaaattacctatttatcaatattaattaagaatgttccatttaatataacaattaaaataaaaatgctcctgaaactttcatgttatctataatattttccatatcaaaagaaaaactgttcttcatcctctctatgttactcctatctataaaattctaatgcattaagtattttatctgctgctttattatatttttctattctttcatgatccttttgagaaggatttttaattcttgatagattcatattgtcttttaaatcggctagctttatctcgcacgctaacctattagtaattattctttctataaactcatcgtatgtttcattatgccgtcttgttaatgcatccagtgcagatagtatttcttctgaaaagccttcattttttaaataatctattgtaatatcagtatcttctattacatcatgaagcactgcacatatcatttcttcttggcttctctttgaaatcattaatcttagaggatgaagaatatatggtttaccacctttatccacctgaccttcatgagcttttgctgctatacatatagctttttccaacatatcttcatctccttttactagtcaaattatattttcagtaaatttaaaatataatttgtgaacttataatcgagtcaactctatggatactgtaccttttggggacataacattcgacttcttcggtataaacaccaaaggcatcttatggacattgtaccttttaaggacataacctccaagagcatcagaaacaatatctgaaatagattttattctgcatttaccgcaaaaaaactgctataaaattaatatccaaagcagttttttatactgtaataatctatacaaagttgtattcgcctttaaattagaatatcatttcataatatctctttacacttgcttctaattctagtaaatctaaatttcttcctactcttatactttccttgccttctatataaagtagaaatattggtacagaaaatacattatattttgctgctaaatctaaatgcttttctgcatttacttctccactcttaatttcaggaaatctttttaaaatatcttcaatcttagttttaatgacttcacacgccccgcaagctcctcctgtaaaatatatcgcgctcattcttttgtcttttattagatctaatagttccgtatcattattcaaattgtccaacttaatttacctcactatattgctcttctatcatcatatttaatgtcacaactttatcctcacctaatatttgatttgcagcattatataaatatttatcttctgtcactaatataagactatcatctgaatgacacgcatataaaagtaacaaatcattctgtgataatttatttatactatttaaatatatattaccacttttagaatactttatatttaattttgatgaaaattcttcgagattactcttatttatttctataattgaaaatagcaatttacagaatctttctgatagtacttgttgacctttgtattctttcctttccttgaccacaagctcttcactcacttcttttaaaattattattttctcatcttctatgagtttattaataatcgaaggatactgtttccagagccctattacaacattagtatccaataaatacttgttcataattatccctcccacaattgctatagtattatccttaatctatttatatatttattatactccgtattatttttttattaattattataatcttagttttctcatctatcgaaaattcattcttttaattatataagtttttctctcatacatacgaaaagctttagacataatttttattgttttatttttattgtattctcctcacctacttacatgtgccacttgcaaaatagtaatttttaagtggcaaacctattagtgatatagccccaaataataaataaagtcgtgtatattaactccatgcacggctttatttgttaaatttcaatcagtatattttatagacttaagtcttctccattagttgaaataacttttttataatacaattgacgtaattatcaaataactacatcttaaaatcaactattatttatttctctgaatcttatatgattaatttattaaaaactattagtataaaattaactcatataatttttcacgttatcctttgttactttttcaaatggaacccatatgtgtttcccatcctgtgctaaattttctatattagataactcaccatttgatcctagttgaatagctgcctgaacagcatttttgctttggtctttcgcagactgataaacagtaaattgtaaacctccatctacaatagccttgcatccatctgacgtagcatcaattcccacaatcggaattaatgaagtatcgattttattttctttaaatgaatccattactccaagtgccatttcatcattattagcaattacgcagtcaaattttctacctgtagacaggaatatattaaacatctccttagcttttgccctgctccaatctgcattatcctcaaaaacataatccgcatctattcctttttccttgaaagtttcttttactgccttcgtacgccctttagtagccgcatggttcttctcaccttttaataaaaccactttaagattatttttatttttaaaataatctgcaatatattcagcttgatactgccctgcaactttttcatttgaagctacataaatgtacttatctttttctagtaactcttcacttggactactattcataaatactattggaagatttcctgccgcttttttaagttgtagccctgtagttgaatccactggagtgcatagtataacatcatatccaccagaaactgcctctttcatatgagacacttgagtttctatagaacctgccgcatctttaatatctaaatccactttttcactatcagcaaagtcttttgcactttttgctagcatgctacgaaattcatctgatgcatctgaaattgataatagaatttttacgtttttctttgtagaagaactactctttgagctgcatcccgataccataacaaacatcataattatagttaataatatagatattctctttctcatactatatacttcccccttaaaactcattatgtaataattataaaatctaatagaacaaaattgcatgcaactgtgaaaccttctaaattagtctttttgataatttatttctcgcaagtgtcacaatacccacagattttactctaatgcaaattcctagagaataaaaaatatccctatattttaaacattttaatctgtttgctaagttcatcagatgtatttgctaaagtttctgcatcattagctactttttcactatttttagtaatattatttgactgatcaaccattacttctgacgttgctaaaatttcctccgaacttgctgcttgttcctctgctatggctgctacagttgttgcaacatcatctaaatgtccaactttttcaatcatttcttgaattagatcatttgctgaattaattttattgaaaatattatcaaatgtatcagctgttccacttattaaataactactttcattgatatattctgcactatcatgtgattgctttacagtatctgaaacaagtttgttaatttcatttacaatagatgaaatatttttaacagattcagaacttgtattagctaatttgcctatttcacttgctacaacagcaaagccttttcctgcttctccagccctagccgcctctattgatgcattaagtgataaaagattagtttgttctgcaatacttccaataacatttataatattagttatttcacttgaagattttccaacattatttatagcttgttcaagtgatcctattgaagtccttatattttccatagctgcgcttactttttccatatctctcatacctttttctgagatattaatagtttccttcattttatcattcacattattaccatcatctctagtattagaaacgacattagctaaagttgttgtattttcagctatttctcctaccgaacttgataactgatctactgtgaggtttaaattctgcatagactcagattgaagtttagatgaatcatataactctgtagagattcttataccgccttcagattgttcactcatcttatttgatactatactaatattatttatcatatttctcattactgttataaactcttttacacttttcagcataactgaaatttcatcattaccccttatttccacatcaactgtaaaatctccattagtcatagatacaattgtgtctgtaagttttctaataggttttataactacttgtacaactctttccactaaaacagctaaaataataatagatataatgcctattaaaatcataaaagtacgaagctttataagttctgataaaatagattttgtcggtacatatgatacaagaatccaattggttccctctacttctttaaaaacaaccctgttatcatctaactcgcatgaattgtaatctttattttcaatttttcctgcaacatctgtaaaaaatttatcattgctagaatcaagtttagtggaaattaatgaactatctctattagctactattgttttatcattgctgtctatcaagagagcttctgcatcatgcatatcaatcattgaatttacaattatcgatactttatccaatgaaagatctacagaaaaaatctttattattcctgatttatcatttaatattgccgaagcactaacaacattcttaccaaattcattcttatatggtgatccaaatgccatattaacgcgagtaagtccctctttataccacactgaatcaagtacatctttatctgatttattagatttttctgctttaaatagctttccactctcgtcaccaatgtaaaatccttccttacaattgtcactgtatccataatatttatttagtaagtcttttagttgtttttcatttaaattcgcaacttctagtgaatcttttaaagtgctaaatgatgacaagttttcatttaacaatgattcaatttgatcaacctgcttcttacttgaagtttctaacaaatcattagctgagttgcttattatatttttagacttattgtaggaaataaaaataagcaatgaaattactattactagcattggaataataattccaagcaattttgttttaattgaaaccttatacttagtttccccttttttcataagtatcccccttttaggcagtatagattatactagcattattactctatctataatacaatttttcttcctctaagtatactttttttatacattattctgtattttccctttattttttcaaaatcatctatttaaaatgaattttcacaaaaaaatttacagatgaaagtatcttcatctgcaattcttagttaaataatttttatatatttataatttctcacataatgttttaattgcatgcattaataagaaaactaatccaattccaaatgaagctcccgtaaatagccttctaatattagttgatttcttaattttaaataattgtagtaaaccatcacaaatcataattaaaatcaatactccacatatctttaaactaatctttactttgactacaaacaaaatcactgcaattatataacccaaataaattccagtgcaccttgcacacactggaaattgaaatcccctaaaactgaaactcctttcatacatttgatgacaaccactaagtgcaccagctttcataagaagtatccagaactttgttttcttatccgttatattatttaaatcttgcgccacaatctgcacacaccctataagtatttgtcttagttttagtttttcccataccgagcattccacatagcaatccaattggacctaaacatatatatcctaagcagccttttcccgcaccaaagcctttcgtagtttcagtaatatcacttactactttgacatttaaactcccacatctaggacatccaacatttatattattcattctctgtatcccccgcaacaataaaactaccataattatactactgagaaatattacattgcaataattctccaaattctaattcattttacatattcacggtaaggcatacgtaagattctattatcatcaaatttgtattttgtaccttcgagaggatcttttcccttaactaagttcatgcctacagaatatattgcttgagcttctgcacttgcatcttgaataactgtcccggtcataaatcctttatctactaattctatagcttctggaatagcatcaattccaactaccaaaacatttttatttttatcacctttattatacccatatttctgaagcgctttaacagctcctatagccatagcatcattatttgcgataattgcttcaacattattgccatatcttaaaaataatgagtcaatgctcgctctagcacattcttcatcccaattacaactttgtgctgcaagttcctgggtttttattcccgtatcgttaattgttgaaatagaatacttcgttctatcaatagtaccaggatgatctatttttccctgaagcataatatattgaagtatattatctttatttttatctatagctcccttattggcattccatgaatcaacaattatcttaccttctagaactccagattgctctgtatcagttccaagaaaaacaatactcttgtaaggagtaataaaatttaatatatctttattaggtgttccatctaaaattaatggtatattatttttttcaattttattaattacatcacttatagtatctacctttgtatcaaccagatttattacaaacaagttaaactgatcatcaatagcttcgtaaatactttcattttgtataacctgattcccttttccatcaaaaaaagtgaactcaaccttacccttattttcttcctgaatctcctctaagttctttctaacctcaatattatattgatcatcttctctagattgaaacacagctacttttactggaattattgaagtatcatttaaattagttgataaactcttcggaatactgcccactagcatagtaattatcaaaaaagaaattgtagtaaatatgcttacctttttaaatacactcatttcaagaccctcctatattggttataatcatagattgtcttttaataagagttttattctgcatagaaaatattcttacttatgctaatatgatttattttgtattcttttaaaatattaaaccgagttaatttatctcttcaaaaaattatgccatcatggagtaccccgtgaatatattttactgaattataattttctaaagaaaaaatttaatgaccacaattttgtggtcattaaatttcagctttatgataattcaaaagctcctgtatataattgataatacttacctttttcttttattagatcatcatgatttcctctttcaataattctaccttggtctaataccataattacatcagagtttttaattgttgaaagtctatgagcaattacaaaaactgttcttcctttcataagcttatccattccttcttgaacaattctttctgttcttgtatctatgcttgaagttgcttcatccaagattaaaactggtggatcagctattgctgctctagcaattgttagtagctgcctttgaccttgtgaaaggctgcctccatctcctgtaagaattgtatcataaccatttggaaggtgtcttataaacgtatctgcatttgcaagttttgctgctgcaactacttcttcatctgtagcatctaatttaccatatctaatattatctgctaccgttccagtgaaaagatgtgcatcttgaagcactattccaagagatcttcttaagtcatcctttttaattttgttgatattaataccatcatatcttatctttccatcttgaatatcatagaagcggtttattaaattagtaatagtagttttacctgctcctgtagcacctacaaaggctattttttgtccttgtttagcatatagctttatattatgcaaaattatcttttcatcattatatccaaagtccacatcatcaaatactacttcgccgagaagctttgtatatgtaatagttccatcttcgtgaggatgtttccatgcccaaattccagtacgctctttgcactcctctaattccccattttcattttccttagcatttaccaaagtaacataaccttcatctgtttctttcttttcatcaagaagcttgaatatacgttctgcccctgcaagtgccataataacaaaattgaattgttgagccatttgattaattgtttgactgaaatttcttgttaactgcaagaaagctgcaagtccaccaagcgtaaatccaccaaatgcactaatagctaaaactgatccaaagatagcaacagctacataatttatatatccaatgttgcccataataggcattaagacattagcatatttatttgcattatttgcactattgaagagcatatcatttaatctatcaaagttagcttttgcttcttcttcatggcaaaagacttttacaaccttttgcccttccatcatttcttctatatatccatttactgcacctatatctttttgttgaagaccaaaatattttccactctttgcaccaataactttagtaactctaaacatcaatagtataattataatttcaacgcctgttaaaggaatacttaaatatatcattgaagcaaatatactaacaacagttatgatagctgataataattgtggtattccttggcttatcatttgtcttaaagcatctgtatcatttgtatataaactcatcaaatctccatgagcatgtgtatcgaagaactttattggcaaactctccatatgagcaaacatatcatctcttattctttttagagatccttgtgagattacaatcattatacgactatatatataagttgatataaccccaacataataaattactgccatagtaattatcattttaagaagcggaccaaaatctgctcctgatttatttaaaagtggtgttatataatcatcgattaagtttcttaaaaataacgttccaataacattagcaagagaacttataataatagttactagtaccatgaaaaataaaaacttatattccttaagtatatacgctaataatctttttagtatcttcaaagaatttttatcggcttttactggagcacgtccgccacgtcccatcattctaggaggtctattgctagcattatctttactcattgtcgctcgcccctttcatttgagattcgtaaacttcactatatatttcatttgattttagtaattcttcatgagttccaaatccatctattttcccatcatttaatacaataattttatctgcatcttgaactgaagaaatacgctgagcaataataatctttgtagtatttggtattgtttctttaaatgctttcctgatcaaagcatcagttttagtatctacagcacttgttgaatcatctaaaattaatattttaggttttttaagtagcgctcttgcaatacataatctttgcttttgtcctccagatacatttgttccgccttgttctataaaagtgtcatacttatttggaagactttctataaattcatctgcttgtgcttgcttacatgcatctattaactcttcatcagaggcatctttatttccccatcttaaattctcttttattgttccagaaaataaaacattcttttgtaataccatagaaacctcatctctaagtgtttctatatcatattttcgaacatcaactcctccgacctcaacactaccatttgtagcatcatacaatcttggaataagctgaacaagagtagtttttgaacttcctgttcctcctataattccaatagtctcaccagaattaattttcaaattgatattttctaaaacaaggttgtccttatttttgttataggaaaatccaacattattaaaagttatagatccatcttttacttcataaactggattttcatcatttgccaaatcacttttttcatttaaaacttctgtaattctttcagctgatgatttagacataattaccattacaaataccatcgaaaggaacattaaactcattaatatattaagagtataagtaaataaactcatcaattctccagttgacatagtatttgaaacaatcatttttgcaccaagccaagataaaagcaaaatacatgtataaactgtaaattgcattgctggagcattaactatgattagtttttcagctcttataaaatatttgtataaagttttagaagctttataaaacttgcttgtttcatgctcttctcttacataagcctttactgctctaattccagttaaattttcttgtacactggcatttaaatcatcatactttttaaaaacctcaacaaaatatgggtgtactgtagtcataatgaaatataatataactccaagaaaaactatagcacctataaatatcatagataattttgcattaatataaaaacacattgttgtagcggatataagcataaatggcgcccttacagccattcttattatcatttggaatgcattttgaacatttattacatctgtagtcagtcttgttataagtccagctgtagaatatttatctatattggagaaagaaaaattttgtatattataatacattccctttcttaaatttctagcaaaccctgatgaagctttagctgcatgtacaccacccaagactccaaaagtaagagataaaaatgatgttattatcattgccccaccaacaatacttacatatttcacattaccttttcctactccattgtcaataatccatgccattaaaagcggaataattgtttccataactacttctaatgctacatatagaggagttagaatactatctcttttaaattctgctacaaaacctgctaatttttttatcataattttcctccttctttgttaggtttctaactaatagctcaaaaaaaattgcatagcacatgaaaataaataacaagtccaaagttgccaatagaagttccgacatgcagcatagctactcctttctaatgtgtggatatttttcatcaggcaaggaggcaaatttccctcatagcgggcctattaggtcaatttgccgatgagcagagaaccaaaatctatgattttgtgtgaatcgcttactcagtgagcgtatgcgagtcgagcttcctttatggtggaaaataggctggcaaatgtacttgttattttttgaatgtgctttaatctgcaattttcttagctaatctatcaattaaagaaactaatatattgaattcatcctcatttaactcatctcttaatgatttttcaactctaaggataaactcatatacatttctttgaatttccaagcccttttctgttaatactatttttttaagacgtgcatcttctgatacacttattctcttaatatgcccgttcttctccattaattggagtacgctcgtaactgaagaacgtctaatatcaagttcctcttctatgtctttctgaaaaatgtcttttttatctgatttatgatatatgaagccaagaatcctagcttgaactccagtcacaccatattctgaagcttccttatctattcttctatgcaatctcctagataacatactcaattttttcccaatgtgtacctctttatccatacttatgctcccatcaatttgttagatttctaacatatattatcttaattttattttttaagtttgtcaaggtaatataattttattttaaaaataatatttttcaactcttagaaattagtttccttctatttattatcaattctttatatgatattttctatttttatttgatgaatcaaaatctccaataacaacttgaagcctttcattactgtatttatactcctgctttaaatctattatttttttgaatatagaaactcaattgctgcatatgtatattaaatttactatctctgtaacatacctaaaccgcaatcataaaatgaatgagacaggctttactgccatagcaaaaatacgaggagattctcaatgtataatgatgattttttttactgtccgtattgtatgcagaaaaatatttgtccattttttgatgaacaaatgaaaaatttcggcgataatgatcaaatgtcaagatttgatagatacgaagattcttatgaatttcaagattcaaacttattgactaaagaaattcactcagattcttatagagcttctgaccaagaagttaatagaatattaagattaatgcgtaatcaaatgcctcaacttttctcactattccaaggagttggcgataactattttagaaccgctattgctttcactttagataatgctcaaacatatccgggaaatataaatcaaagtgtaaatagaatttttaatgactttagaagaagaaataattcaatttttctttctcttcgttctctaggtgttcctaacaacgttattaatctcacttttagatctataattgaatttactcttagaaacattaaaccttcaccagctcctggtccaaatcctactccatcgcctagtagtggttggagtaaatgggaagatcttggcggagttttaaaatattctcctggagtttcttcttggtctgcaaacaggcttgatgtatttgtaactggatctgataatgctctttaccacaaatggtgggacggctctcgctggaatgatttcgaaaaccttggtggtgtcctaacttctggtccagcagctgtttcttggggaaataataggatcgatgtatttggtaaaggttcaaataacgcaatgtaccataagtggtgggatggctctcgttggagtgattttgaaaatctcggtggagtcttaacatctgcacctgctgcttcttcctgggccgcaaatagaatagatacatttgtccgtggaacagataatgctctttatcacaaatggtgggatggctctcgctggagcgactttgaaaaccttggtggcgttctaacttctggcccagcagctgtttcttggggaaataatagaattgatgtatttgttcgtggtcagggaaatcgtctatatcataaatggtgggatggttctcgttggaatgactttgaagatcttggtggaaatttagcatctgcccctgctgtatcttctcgagcttctaataggctagaggtatttgcacgaaatcaaagtaaccaattaattacaaagacatggaacggttcgcgctggagcgattggcaaacaatcggtggttccttcactttagatcctgcggctgtttcttggggctctaacagaaccgacgtatttgcaaaaggtccacgaaattctttattgcatatttggagagattagctagtataaattattgaattataattttctaaaagaacaaaaaatgcttagttttttctgtactaagcattttttattgctataaactttacaagttaagcaatgtatatagattttttataaactcataaattcacaactaactttctgcatctgtgtattgttcttccgcttaatgaaaatctatggaaataaggttgtattaataataaataaaaacaaccaattatattcttattaaaatcaacaatacattcaattaaccggttttattaaatagcaacttccaagaatacatttaacttctttttttattgcagctacagctacccctacttcttctgaatttgaataatcattaagttcaccataaattcctgcaattgaaagcgaagtaagtggaaatataccattttttccatatctatctgtggccgtaacatatctattacttctgtctttttcattaaaaaaatttaaaatcccatcattaaacttctttataattttttcacacacttcttcacattcttcaattggattttctaaaatacttacaaaatcatctcctcctatatgtccaataaatccattataagggaaaagtgattttatttcagcttgtattaattgagctgtatatttaagaatcctatccccattttcaaatccgtacgtgtcattataaattttaaaattatctagatctagataaagaatacaacatttacgttttgttttaattatattcattatattattttgtatagcggtattacctggtagctcagtaaggggattaagttgtctcgcgtagttacattctagcattgtagtataatttaacaaagatcttattgtaaccattccacagtatttattattgttagtcacgataatataatcatatatattttgtgttttcctagacattgctaaccttgaaacttctgttactggtgtgttgtaatctacaactaaaggatttgtatccataactaaagaaacaggacgttttgtaaaaattgcaacaccatattttgtagcaagcgctgagtctaacgtatgtttcataataagacctaatggtacatcattatttactatacaggctccagtaatatcgttagaatcaaaatattctttaatatcaccacaataagtttgaggcccaaatggactatcatgtctaacaatttcgcctatactgcttgactgatagttataatacacattatccttaaatttattacaccttacaattaaatccttaatatgattagggatatctaaaaaagttcctgctggacgacttagtaagaaaccttgtcctgcatagacgcctaagtttactaatgttctcaattcttcttctgtttctattccttcagcaataagtttcatatttgttgcttctgatagcttaacaaagcattctactaatgattgtttaaatgaatcttcatttatatctctaattagatccatgtcaatttttacataatgtggctttgtttcattaagcatcttaagcccagaatatcctgaaccagtatcgtcaattgcaattttatatccttgatctacataattgctgagagcctgtttaaaacctctgtaatcttctatacacgtcttttcggtaatctcaaatattatacaatcaggtgacatattatgttctgcaagaaattccttagtaaaccctttcttaaatttttcgtctttaaaaatatgaggatccacatttataaaaagatatttatttttttcaatattggtagctcttttaatggcttttattctacataattgttctaactcccatgttttattataaacctgagcagcgttaaataacttatccggattttgcaatggtgagtctatcggccctctgcttaacgcctcataccctatgatttccccatctaaaagtgaaacaatgggttgataaactgtagttatatttttactatttaatatattttccaactcctctgcctcattatattttaaattatcaactaatgaatttaacatattataatctccccatatttcttcttattagctattatagtagctcttgtaaatatagttgaaatataacataatcttattaaaagtatttataatttttgttaagttaatgtaaaaacgtttatctagtcaaaaccaaatttattacataaattggaattaacatattttgcttccataaacttatgatataattattgtaaagacaattctaaggaggcatcttcatgacaaaggttaataaattacctacaacaaaactgtggaatccgaaatcatttattatattttccgtgtttttctcatttctaccagctgggatcatgtgtgctttgaattatggtcgatctggaagtcaaaaaaagaagtggatatttcttttaacaagcatcttagtgtttatagcacttatagcactgttgcctatattatcaattaatacttctatcatatttttcagtattaatatagctttaggaataattcttatgttcgcacagttaaagctgtataatgaccatattcaaaatggagggaaaagtgcttcgtatttatttcctataatcatagggcttttgattttttcattgtctgctgcttcaattctatattcaatttacgtaccaaaaaatgctcttgattatggcgaaaatcacttattttatactaataagataacagaatctcaagcgaaaaaacttggagattacttaaattcagaaggctactttactcctagttcaaaagtagatgttaaaattgataagcaagatacactctatattttatctctcgttgtagaaggtgactataaaagtgatacaagctatgtagaacctatgaaagcaatatcaaaagagatttctaaaaatgtttttgaaaacaataaggttagaatagatttatgcaatgatagattcaaagttcttaattccatcaatgtagactaaacttttcagtaatctatctttaaattttattatgtttttattctaaatttcagcaaaaagaagactagcgtttatttgctagtcttcattcgtatttatatgattaaatgagattattgtatgatatttcatttcttcttgaatacacaaaataactctcctctttctcctaagaatttatacatttcaaaacataggctggcggtaaattaaagataactctttctatatttatctttttaaaatacccagtaataaattcttttttcaaaagagtatattgaaatgttataaataatccatttctttttaatatatttctagtttgtcttaaaattttatttgaaacagctttaggaagactagcaaaaggcaaccctgatacaacatagtctactttgctaagattatattttgctaaatgtttatcaacattttcagcagaatcatttattattataatatcatcttctcctttatatttctcttctaattgtctacaaaattcttcattatattcaaataacattaataatgtctctttcttttttctttttacgagcttgtccgtaaaaactcctgtccctggtccgtactcaattataacctcagaatttttaaaatctatgtctcctaccattttctctgcaagtttctctgaactaggtgctacagcccctatagttctaggtgatttaaaatattcaattaaaaattttactagcttcatattaaaagcctccttgaattcttctcttttagttaaattatagaattagtataaatcttaaatattaaaatctatttagtaaaatcttaagaatctttaaattttgttttaaatataaagaaagaaggtatacactttaaccctcttttagactttattttatatataatgtgctttaatattgatttttgttctttttaatttaaattatttcttactgtattaatcattttctccttattttcctctagttgaactatcctatttacattagccccagatggatgtggaaagccttttaatatttgcttttcgtttataattttattttcacatagcttgtataatacttcttctactgacctgcctaatggtactataagaattttatctaaattatttaatgcttttaattcataaataaaattctcataaatatatttcatcaaaaattcactcctaataagttttggagtgtgacctgaatagttttttccttttacaaagactgcataaggtattaatgaaaatgtgtgcaataaatgatctttttcttcaaacaattggctgcaattatctatttttagactcttattaagctctattttatctaacatatcaattaaattttttctgagactaccgctgaatcttcctgctttcttacatttatactgaatttctttaatattatcagagttctctaactctcttcttgcagtagcaatagcagtactcatttgctggaagcctggagttataccaacaataaatacccttgcgtctaaatttatatattcattgtgaggcgaataatatatttcaagctcttctttcttatcaattaaaaaatcgtttatcaatagttcactcttattgtatttctcttttactggtaattttttaattttatctttataatcatataatgtttttttcataatcagcctctaacttctacatttattttgctactttatattatcttcataattaaaaaatattattaatatatccttcactaataattataaatttaatggaaattttttttaatagaagataaaaaagatagcagcttcataataaggctactatctttatattcttcttaactattaattaattttgcaatcctctcatttgagctttttgtaaatactccaccatgataacagataacagtttctatatcatactttgtaagcttcttaagagattctattgcttgcttcatatcaaatgtatattccggattaggaccaattaattcattatttacaacattcattgcgtctccagttaccaatgccttatactttcttagatagagacaaatatgtcccggagtatgtcctggagtataaattacctctatccctccacaataaggaatattctcttcatctttaacaactctattaacttttgttttaagctgctttatggtttccttcatagaatctggcattgaactcaaacgctcaggagtaatttttataccaattttatctccctcaatataaggcctttctccactatgtgctaacacttctatttcacttttagaattcttaacaatacttgacaagctaccaatatgatccaaatcgtgatgagtaataattattttattaatcttgtcaaaggatacacctgccttttccacttcttcacgaatattttctatttgtccaggtaatcccgtatctattaaaatcacatttttatcatcccaaattagtgtagcattcattcttctttctttgcttcctaattcaagtatatctaatccttctgcaattttcatttttcttcctcctaattaaaatttactcctcaattaattttcccatttgactaataaccattttgtaatactcacctttttcattcataagacttttgtggtttccactttctaatatttttccaccaccaattaccataatgcgatctgcatctctaatagtcgacaatctgtgtgctattaaaaagctagtacggtttttcattaatcttaataatgcatgttgaatatctttttcggtctttgtatctacactactagttgcttcgtccaaaattaaaatcgggctatcacatagaactgctctagcaatagacattaactgcctctgcccttgacttaagttatctgtagctccagaaaccattgtttgataacctttaggaagcttatcaataaattcatgagcatgagctattttagcagcatttacaacctgttcatctgttgcatcttttttggaataacggatattatccataatcgttcccgtaaaaagacaagtatcttgaagcacaaccgagaagcatttcctaagactatttctttttatattggtaatcggctcatcatcaataaatatatttccgctgtctgcatcataaaatctagtaagaagattcacaatagtagtttttcctgctccagtctctcctactagcgcaactgtttctccagctttaactttaaaactcacattctttaatataggtatagacttatcgtatgaaaaacatacattttcaaaggttacattcccatttggttgttttatctcaattgcatctttaagatctgcactttcttcttcattatctaaaatttcaaaaacacgttctgctcctgcaagtgctgattgaattgtattaaacatacctgctacagaatttaatggctgtgaaaattgttttgaatagcttaaaaaactaactacagttccaacagctacaccatatcctatggatagcataccaccaacaatagcaacaactgcaaaaataaagttattaataacattcataagaggcatcatatatccagaccatatttgcgctctattactgctttcatatagattttcatttatctctgcaaattgctttaaaacatcctcctgcttattaaaagcctttaccatctttagtcctaatatgttttcctcaatcactccattaagtgagcctaaatttctttgctgagctaagaaatatttgcggctatgcgttgcaattacacgtgttaaaagtataactagaggtatacataataaaacaactagtgtaaggggaacatttaacactatcataaccataaaagatccaactaaagttaaaatacttgatattaactgtgtagttgtttgtgcaattgtagagctaatattgtctacatcatttgtgattctacttattgtatctccatgggaacgtgtatcataaaatttcaaaggaagcctctgcatcttttcaaaaaactctgcacgtattacaaaaacaagtttttgtgaaactttaagcataataacaccattgatccatgaaataagacaattaactccatacaaaactgcaattatagttaaaaataatataagagtcgatttatctacagttcttgttgctattctaaatgtatcaaaagtctttcctacaaaataaggaatcccaacagaaattgctgatgaaaaagctgtaaaaatcatagctagaaagatcgtcttagcaaaacgcatgtatattttaataatacgcactaatgtgcctctagcatttttagctttttgtgtaggtgcaaagcgatttccgcctccacccacacgtctcccactaatagaaggtacttttacttcagttttaggaaattgttgtgtcataatatcctatacctccttgctgctctctatttgcgttttataaatatctctatatacttcacagctttgcattaattcatcatgagttccatatccaaccttagatccattatccataaccaaaattctgtctgcaaacatcgctgttccacaacgttgagtgattgtaatcacagtttgattacttgtttttgaacctaagttttctctaacctttgcttctgttactgaatctaatgcacttgttgcatcatctaatataattacagacgaatccctaagtattccacgagctatagaaatacgttgcttttggccacccgaaagattaactccagcactccctaacatactttcatatccatctttcatattatttacaaaacctgcttgtgccttttcagaagcctcatgaaccatcacattgctcgcttcccttttaccccatctaatattttcagcaacagaaccagaaaaaagcattggtttctgcggcactatagcaatgctatttcgtacagaatcaacatttaattctttaacatcgtagccgtcaattaaaatttttcccttgttcacatcataaaatcgcaaaagaagccatgcaatagtagatttcccgctgcctgttggaccaattatagctaaactttgtccacttctaatagaaaatgatagattatttaaagcaggtacaccactaccatttggatatgcaaatgtaacatctctaaattcaatattaccatttaattctttcatttcaccatcatgagaaaaatctccatcacaatcaactatttctttaatacgagcagtagaagccttggttcttacaaatgtattgaatatatttgttatcataattaatgaggtaagaatttgtgccatataaattacaaacgctgatatatctcctggatttgcaaggtttgctgaaaagagactgctacctgctgaaattacaattattgttccaattccaacagtaagagttataagtggtgacacaaatgtaataacactttgagatgatattcctttttccattaagtttgtatttgcattttcaaacttactactttccttatcatatgttccaaaggccttgactaagcgtacacctataagatattcctgaacaactgaatttactttatccatcgccttttgtaattcataaaaacgcggataacttaacttcatactaataataataagtatcgacacaatcgcaacaacaccatatataataaggctcaacctaaaattaagcagtgttgcaagcacaatactacctatgcatgtaatcggagcctttaaaaaaattctcataattccattaacgaacaatataacctgtgccgtatcatttgtcatacgtgtaattagagatccactttcaatcttatctgtgcttaattctgaaaaataaacaatcttttcaaataagtcatacctaagatctgctcccattctttgagataccttacttgctaaaatatttcttgtaactgcgaaaacagctccaattgcagttactataagcataagcattccccagtaataaactttagaaagtgatccttgctcaattcctgtattaattatgttagacataagtgttggaccaagcaaatcacaaattgcttcagatgcaacacaaaaaacagctatcccaaatggaattttatacttattaaaatatttgctgtataagttcatatcctttattcctttcctttgtttaaatgctaattcccataccatattatacatcatttttgcatacagaatacaataaatatttccagctgcttgtatgcgttacctaacagctataatatttcctatcaattattacttaaagtgactctcaaatatcaattcatatttttaattcttattatttctttcagttatgatctctttcagttcatctctagaaatcttctcatcatagtagtctagtttcatatttacaagttctagaagatcattatattttttgatttcttccttaagtatttctttttgttcaagcataatatttcttctttcatccaccgtatcctttccctttgtagtcaaactaacataattttttatatacgcaattgacattcctgtagccctcatgcagttaacaagctgaatagatcccagatcaacatctgtgtatattcttctgccattattatcgcgttgaacaaaaggcaataacccctcacgctcataatatcttaatgtatacggtgttatattaaatttttcggaaacttctttcattgaatatttcataagtcacactcccaaatatctcaaaaattatttaaatctataagttctattagcaaaattcatacactataaaattacttcatctagatatattatctatatatgcaaatctctatgcttaatgaaatatattactgaactctacttataagactataaaatcatctctcatttttctatttatcattttctcttatttcagtttcatcatattagttattataaaagttaatatatctaaaaatcaatacattagaaaataactaaaaaaatataaaaaaatttcctattgacttacactgcactctaacaaatatactcatcttatactacaagattggtgaaaagaatgttattctttcatttctattatcttgtaaatcaaattattttctaaggagaaagatatatgaaaaacactactcaaacaccaataaattcaaaatataatttttctacaactgcaaaagatgttatagatggtataaacttgaaaggtaaaattgcaattgttactggcggatattctggaattgggatagaaacagaaaaagttttagctgaagctggtgcaacagtaataattcctgctagagatatagaaaaagcaaaaggagctatggataatattccaaatatagaaattgaacatttagaccttatggatccaatgtctattgatagtttcgcacaaaagtttataaattctcaaagatctcttcatattttaataaatagcgctggaataatggcacctccactaataagggacaaaagaggttatgaatctcaatttgcgacaaatcatctaggtcatttccagttaacagcacgactttggcctgctctaaaaaatgctaaaggtgctagagttatttcagtttcatcaagagcgcagcgtcttggcggagtcaattttgatgatccaaactttcaaaaaacagaatatgatagttggaaggcttatgctcaatcaaaatccgccaattcattattcgccgttgaattagacagattaggaaaaacccatggtgttagggctttctcagttcatccaggtttaattccaactacaaatcttggaagattctctgttaatggaaaaactactgtacaagaactaaaaactaacactagaaaagatgacactaatacaaaatcaaatgaatttaaaaccattgaacaaggtgcagcaacctctgtttggtgtgctacaaatagtattttagatggaatgggtggagtttactgtgaagactgcaatatagctgaagctgttccttatgacagtttgaaagataatggtgttcgtccttgggctatagataaagatctagcaaaaaaactgtggatacttagtgaagatcttacaaatgttaaattcataatttaagttttcttaatataatttttagcatttaatcaagtataattaattagttttatcttcattaaatatttataaaactaaatcttccacgtattaataagtttacttttctcaataataactatataacttatctttaagttatttaaatttttatttagagtattttaatatattataaataattttttagattattatgttaggagtgatttcaatgaaaaaaggaaaaacactagatgatcaaacaccaagcgtctatgatactgaaaaaattattgatatccattcatctgaggacgatcaatcccttgattcagaaaaagtaagatacgctaacagtcatgcttcacgttcaaaatatactcatggttcaagcgacgtaagccctgttaatacaaaaaatccagactctacagaaagaattcctacatcagttagatattctgattctgacatacataaagatgatgatgaatttgactatcaaggtgaaatataaattatctatataaatcaaaaccaacgacagcatatttatgaactgccccctgtcaagtagacagatgaaaaaacaaaaaattatgaaaccaaggtctgatttcgatattcaattggagtcagaccttttaagtttttctgtagtctttttgtattatagaaaact

SEQ ID NO: 87 - DNA, 25814 bp, Clostridium beijerinckii
catattccctatcggggcgtaggcaaagtaataaattagaatattaaaaataataagaggtgtaatgttcgttagaaagataaatagttttctatcaaatgttacaactagattatacaaggaggtttaagatatgagtgaacaatttcgtacttacgaaacagcttggtgtccaggctgtggtaattttaatatattagaaagtttaaaaagagcgttaactgaattaggaaaggacccttatgaggttttaatggttgcaggaattgggcaagccgctaagttgcctcaatatataagtgctaatagtttctgtggtttacacggtagagcaatacctgttgcagttgctgctaaaatggcaaatgataagctaacagttatagtagattctggtgatggtgatacctatggagaaggcggaaatcattttatccataatataagaaggaacactaatataactcattttgttcatgataaccaaatatatggtcttacaaaaggtcaagcctctcctacttctggaataggtttagtaactggggctcaaactactggaaatatcaatgccccattaaatcctgtagctttagctataacacttggagcaggctttgttgccagagcctttagtggagatatggatcagcttgtttcaattatgaaggaagcaatttcttataaaggatatgctatggtggatatttttcaaccttgcgtaacttttaatcatattaacactttctccttctataaaaatagagtttattctttagatgaaaactacgaccctagcaataaacttgctgcactagaaaaagctatggagtttggagataagattccaactggaattctatatagagaagataaggaaagctttagtgaaagaaatgttgttttaaataaagatacagctcttattgacagacctttcaatccttctattatagaagaacttatttctcagcttgtataatttaatttatagttatgagcattaaagattatttcaacaaacaaacttgatataaaagagcaataataaatttgttattgctcttttatcctttttgaataattacaaatataaccaaaggaaataaaactaatttcacttatttggtctatttaataatttagttttcaaaaaaggaagctgatagcggttgtctttctgtaaatcttttaaagctatgtttaggatatcctaccattacaactcctgttattttctttttctctggaatgttaaagatcttgtgcattggtgaattatcactacgagcacaaatttcaaatactcctgcccaacatgatccaagcccaagagatggcgcatataattcaagatacgataatgaaagaattgaattttctctaccattacgaaaatcttcatcagccaaagttataattatactaggtgcatctcttaagatagtgtcaactttagtattcttgtagccactaatcattcctgctaataccttactcaaagtttcattattttcaaaccagttaatgcattcctcaactgctaattgaattgtttttttatcgtctactattagatatgatataccttgtgaattacttgcagttggtgccaaatgtgcaacctcaacaagttccaataacttttctctttcaactggtatattcttatatgaacgaatagatcttcgtgatctaataaaattctttgcttcttctgaatttagctttttgatttctcctatctcactttgcatagctaatggagatttcttattatctatagcctcttttggacatacagccacacaatgaccacattctatgcatgcattaggattgacttcttttgggccgtccgcttctagttttaatactcctgttggacattccaccacacacattccacattttatacatttttctttacttacagttattaaactcatttttattcactccttattaatttttgcactcgcataataatacgaatacacttaatttttatttgatttataatacatgttaaaaaattttcccagaacttgctttttctcattaatttttcattttaaatcatctccaatactttcctatgaacgcatcacatcttattatcacctcccttagctatgcttagtacccttttgagaacaatcattctaattgatataaaaaaattatatattcaataaatcagaaaaatccactatatcatgcactcttctttattctctaaatttcttatattattgatttgagtagtggttatacttttctactatgtaaaatggctcagcagaacatattttttgagaacgctcattctaattagtataaaaaaattagttatttaataaatccataaaaaaatctgccacacgatgtaatttttctttgctcgctgacattcttaactgcacacgaattccaagcaatgtattttgaagtatttctgataaaacttctggatcatacttgcaagaaaattcacctgtttccatgccttttcgaacaagatcagcaagtagttgttctgtttgcatgaatatcttttctattttttcttctatctctttatccctaagagccatctccgttgctgaatttacaattaagcagccccattgtttatcttcatatccttctatagtaaaatcaaagataaatcttatagcttgttttgctgtttctgcatttgaaattcctgcctgcattttattttttattaattctgcataaaaatctacggtttttaaaaataatgtgtgcttatcaccgaaggtatcatataaacttctgcgatggattcccatgtgctcaactaaatcatttaaagatgtcttttcgtaaccttgcttccaaaatagttccattgctttctgaagaactacattttcatcaaattctctgcttcgtcccatcaagttccctcctttatagaattaatattagcattttgagaacgatcggtcaagaattatttacatacttaatcatatctatattttcgcacattacatgctggaaagaaaagttacctggcacaacacaagagcccctaccctagcctacaattttctgcctaagacacttcactaaatgagtttatatctaatttctctttttatcttgatcttaatataacgccatccctttgaagccaattcttctgcatatgcttttccaataccagataacgcttctgtaaccaagataacttttcccttttaattaaacattttcttaacatcttaaaacagatcaattatttgcctctattatttccttcaatttaacattttgattaataaatctagctttacttttttcctgcttaagtcgtatagcattctgtggacaatgattaatacaggctaaacactgctcacaatttcctttataaacaggtttagtatctgcattaatattatttactgggcaaactttctcgcaaactttacagctattacaggtatcttctacatagaaattcttatcatattgagcgttagccttagtcttagaatgaaacttttttaatattgcttcaatacatcttataactgcagtgtgtctcttgatatatacttttttaacttggatatcattaattatttgtgcaagactttcttctatattcttcttcggctctttttttatctctttagccatatcaaacactggaaggtaattgtcaaccataagtatttcattaatgtatgaaaactggatttgatttctttttccaatttctaaaagctcaggtatgactgctcctgaaaaagatccaaaagacactacggcaaaaatatatttactttttagttcaactttatttagaaactcctcaacaattttaggaactcctccataataactcggaaatacaataccaatcttttcatcttcaaactcaaactgtcctagtttcattaacttaggaatagaataactttctcctccaattctctttgccacatataaattgttgccagttcctgtaaaataaaatattttcataatgcgctcctttcagatgtttcacttgtaactccttatggactatagtataatttgataacataaataattcaagtgaatataggctagctgttacaaaaggaggaatattgtttatgactaataaatacaatgctgaacagaataagattacaaaagagagtattttaggtgctcttatgtctttaatggagaaaaaggacttcaagaatatatctattacagaagtatcacaaaaagctggtgtatcacggatggctttttatcgtaattacagcataatggaagatatccttattgatcatctagacgatatgtttagagagtattcaacccttttaaatcataaagaaataagtaattatgaaatgacacgtttatttttttactattttagacaacatcaaaaatttattgaaaacctactaaggtctaaattaacccacttaatacttgaacgatctattgaatttcttgatatatactcaaaaactataacatgcaccatggattgctctcctgaatttgaaaaatataatattggattcattgcaggcggattttttaatgtattgatgatttggtgcaaaagtggtatgacagagagtgacgagaagatggcagaaattgttcatgataggctttcaaatcatattgctggaatcaccttaacagatttctgattaaatccaagatatatacgaagtatgggaaatggataaaaaagattcgctactgacttaactctaatttaagaatatattaataatgcattattggagtcatcctcccatacaatgtctaaaatattatcatagaaatgcatttacataaaaagttccccactttctagtctgagctgactttagttgatacatttccttaaacataatttctcatttgtttatttcaagaactggatactcctaatttcataaaataactattgaacatcccctaatattttaaagtacttatatgatagccataaacttcttcctaccattgaagcacacccaaatgcgagaattcctatacctataaagctagttatatttccgccaatatatctaaaagccgattttacaacgataaggaaaacatagactccaaggcttaagtacgattcattataataaacctcacctttagcttcatccttactatattttaatgttcttccacgaattattcccactcctataccaataattgaacaaataattattatcataatctctttcaatgaaaaacttaatgtttttgcataatcttcaacaatcattagaataagtagtataggtaacacccataaattagggaacttaattcttttattctttccattaagtatccttaaaaactttaatactataaaaatcaataaaatataaaccattgacactaattccacctctaaactttattttctattcctcaaaattttctaatataataatacaaacactttggaactatagataataacaatctctcaatatcttatcttttaaagtctaattattaacagtaattgtaaacctaatttttatacctaccttggatacagctatctctaataatgacacctttactaaccataagaatttcacttagttaagctcgctgtaataaatattataaatttagaatacatatggaattaacgcccatgattcttttatatatttctcatattctttaccaaattctaatactaaaaatctttgttccctatttatttttataatataagtagttaaaataatacaaaatcctatgatagaagctaaacttccaaatgtaagaaaaattccaaaaaagccacatactattcctgtataaataggatttcttatatatttatatgggccactacgaactaatctttgctcctctactttttggatagctccactccaatttctacctaatactattctagcccatattgcaaataaaagagagattactaagattgcgatacctatatattcaacatattcataactaggcaatatcctattccataagaatatatttttaaactgaaaaaaggtaatggcataagagactattactaatattaaatgtactattcttggtatgttcctttgaccacttgattctttttttacatttgacctagtttttatcgctgctaatatccagtaaatccaaaatataccccaaatataactaactacagtaatattattcataaagccctcctcacattttattagatttaatcatcacttttaatatatttttctgcaatttctataaacgtatcctttgtcactgaattcatgtcatgtaaaaattttaatatggtagctttctcctcatcattatattgagctataatatcttttttcttattatatgatttctcatgaatttttttatgaatttcagacacatttaatcctaattccgttaaatcataatatacttctttattattcccttccttttgatacttcaatacatagccttcgtttaataactttttacacattttagttatagcacctgttgtcattcctaattcttgtgatagcttagttatatttgcatcttcgatatattctatagctgcaatacaatgaatttgtgaaaaagtaagtttattctttatattaggaacatctatttcattattttcttgtatttcctttagtgaaaatataatttcattaacaatatccatattaatttcccccttaatatttcttcctcggaagtaatattatattataatattatttcttccatgtcaacaattttcactttaaagacttactcctagattcaattaatcacttgtaatacctaatgaacaaattccactattaaaaaatataatcattctagactaaatgttgagaatttaattgatcatcccctaatacctgtagttaaaaataacatgtcttaagcaagaactaaaaaaccaccggcttaaccggtggttctgattcatattcactaacgttacaatttagaattaaagaactaagatgattgtaatgaaaattgttctaaatacttggataaactttcaatattaaattgcatatgacgattattcccctcaagtttacttagcattatcccaccttctaaggcggaaaaaatgaaagtagcaagagcgtcggtgtcaagatttggctttaactcaccgttctgtataccttgataaagaatttccttaatatattgcagcatcctttcaaggcttttttgggctttttttcgtaactcaggatgagtatcatcactttcaatagccgtgttcaataaaggacatcctccgataaatgggggatgttccgtaacttgttcatataccctaaatatagctagaattttatcaatcgctgactgttgattatccacagcttcggtaaatttttcattaacaattcctactgcgtaatcatatgcctcaagcgcaatctcatccttacatgcaaagtgacgataaatcccccctctcttgattccagttacttcagtaatatcagagagcgaagatcctgcgtaacctcgctggttaaaaagttcagccgatttcttaattatatacttgcgtgtattttctcctttagtcatagtatctatcctccaaggaatgtaattcttcgtaatttcatcctcattgcacatgttatttttttaattattatagcatatctccaaaaatttaaatagttattgcaagccggggtttatttctttgatgaacctgatcttttaatccaaaatgccaattatataattataaataataaaaaatattccaagcaccagaaatacgaatataaatttgcactttcttaatggttgtgttaacatagtaaaaaagatatcgttcagtatctttttattatattaaaatgaggtgaagaaaatgaacgacacatggtttaaagaacgtaagtatgcttggatcggcttggctgctttgtggattatcggctttattggcgcattattgcgtttcattatggctacttatcaagttcaaatttctcaagatttgaatataagtagaagtttgatttctatggcatggtcaaccaacctactaattgcagcattatgcaccccaataggaggatggattgcggaccgctatggacctaagaaattaatgctactaagtacaatgtttagtatcttagggacaagtatcgtttttgtggggcataattctactttgttttttatcggatatggagtcatatcaggtttttacggtataggagcctctgccacatatattctaatatttgactggtttaagcatcatcgagcaaaagctactgcacttctggcaagctcatcatctattggtctcgccgtttgcactccaatttttatctcgaacacttggttaacatggaaggacgcatttctgatttcttgcctgctcagcctttttgttgcattgccagttattcagtttcttattcggaatcctgaaaatccacagaagaaagcaaaagaatccgaacaaccaaaagtgaaaatacttttcaaaggtcctcatatgttattatttctatttattggttttgcattatttacatgtgggtttaatatgggtactgtagaaatgaatttagtggctatttatcaattgtctagcgtaaaacctgctttgattgccgtatccatgagtaccttaggaattatggaaataatcggttcctttattttcggatatcttttggatcgtatcaataaatttacagcgatgtcgttgttgtacgggatacgcatcttagcgtttataattttgtttgtacattcgccatggtcgccaattgtgtttgcagtcttcttcggatttacttacctaggtgctgtaccaggaggaatgttaattgctaacgagaatacaaaagaaaaaggaaagttcattggaagtctccttctattccatcaagcaggcgggatcattggtagcttaatcggaggtgtttcctttgatatcagtaagagctatcaactactcattggttttgatatgcttctatgcgttttagttacaatagggtattttacgaattattggctacgatacaaaaatactttatatttaagtagatatacaaatgaagttaacaaactacactcaaatgatcaataattaagtatcaatatattttaagtttctatctacatgttctaagtaatgagaatttgatcttaatgatttacattttagccaataaaaaaaacgccataattttattatcacccaaagatttttctttcctaatctgaagatctgtttttccatcttaaaattatgtaaaaacccaggactttctcaagcaaataatcttcaaacccgcattatacaagcatattcttcagaatattagaatatatattctagtattctgaagaataaatattgttaagaatatatcttcttaataatattttagaattatgtacttagttactaatcatattatttttatctaatccattctttacaagaatagaatataacgcaccatctgctttcatatcattaattgctttatttaatgcgtttaataagaaaacatcatcttttttaactgctattcccattactccttgtaactcaggcatatagccttttaactgccttagcaaaggatctttttcctttatatagtagtttataataatagaatcagctaagcccgcatcaattttcccactacttatagcattaaataaatcagttgtactatccaaacttaatgcatcttttatcaagttattttccttccactttttcgctagatcttcaaatattgttcctttttctactccaattactgcattttttaaatcactcataaaattaatttttgaaaatcttggtacaataacagtttctgattctttatacaatggcttagtaaactctactagtttttcactttcaggagttataaatattccaccaactgctatatctatgctatcatcggcattaaatttatctaacaaatctgcaaatgttacttccttaatttcaaccttattaattccaagccgccgtgtaatttcagttatgatatccgcatcaattccactcatcttatttgtttcggtatttatccaaaagaatggaatttcctttgatggtgcagcaatagttattattcctttttcttttatcatttccaatctatctttttctattgagctatttgccattatagttttcgtaggcgctatcataaatccaattattattccaataatatttacaataacaattgaagtaaatatttttttcataaataaaaatctcctttaaaacgataaacatatctttaaattattatttggaatttaaatttaaatttaaattatcctcatttgaaaaaaattcaaacctttagaaataatactttgccttttatgttaacctttaaagcgagatcaatgatcagtttactttacaattgagtagtagccatcacatattattcaacttccaaagagcatgtcttttatttactacgtcaaatctacatataaaatgcaacttttcaaataaaaaattggagagatcgcaacttcactcagaatattgcgacctctcccaattttatatttagttttttcttaatagctgattttttttgctcataagttttgaattaaattctaaatttcttttatatgaataatagcaaaaactcatccccaaaaactctgcagttattaaaatagatattagctctataattgaagcaatttttttatatacaaaatagtagtaaatagatggtaagcaggaaatcccccctattactataaatacacaaacaaaagctagtaatgcacttttttgttttattccaaccagataaataaaaacagatctagaaatagtaccaataactcctccaataatagaaaacataattaattcttctataattcctacatttatatttttaacaatcatctgagtcataccaacaactataccacatagcatggatataataagattaaataaaaaatcctttaaattctgtttcatgatttacgcacctcacaatccgagatattgcttaaagttatttagatattttcttgtgacatatacttcttcatccatatctatgagctttaatataagcttgctgttaaaccatgaaattattctatctactttcactatatttacaacaaaacatttgcttactcttatgaaaccttttgattccaatctttcttcaagttcataaagcttttcttttactttatactttttatccttggtcatgcaaaaaacctcatttcccatagcttcgaaataatatatctcgtcataatttaatactttaagctcatcctcgtcacatcttcctgtgattatatttttagcttcttctttgctgcctgaaatagaatctaaataaccaatcaaaatatttatggtttctatatcaaagtatacccctattttgccgctctttaaatcaaatcctttttcgattaaacatacatcagcattttcattaatctttattttgcgatttgtaaggatttcttccagcattctttttagattttcgctgcaaattaaatctaactccatgtaatttccccttttgctttaaactttaagcaatgcctttctgacaaggatatattaaaaacttaaactctatcctctcgaggatgttcaaaaaaataacaaatcagtatgctagtctattttgtgctataattcgcctataaatctcactaatagcctgcaactttagctccttgtctaacacaaaatatacaccttaaaaatagcagttatgctgcatataagaacttctcattgcatcttttacttgttattttccttcacatcccctactttaaacttcaggcaatacccctggaattataattgatagcataattcctaaaatcaccagcccattcataattataacagtcataatattatgccctgataattctataatagcattaattaaataaattacagcccatatttttgttattactatattaacttctataaataaagaagattttccaaattccttttcatatcctcttctagcatcatacattgtataaggtcttcccatcataatagaaatgaaacccgttaaagctaatactgtatatgaagttaaatatttatattccataatggaattaattcctaaatagaaatataatatattagaaatagtaaaataagctactaatactatcgacatgattcctatatttttattaattatatctcttataaaaagcatcagtatagaagcaaatcccaaaacaaggcataaattactcgaaatactccaaaagagcattagtggcagaaaacttaatgttacattgagaaacgcttttgaactactacccattatttttccctctatctttctcaagtgcctttttatgacctgtgatcatgaaatcaaccatatttttctgtacatgctccttgaatttttttcttttcataagatatctcataactttcccttgagctttttcttttaaaggaacttttttaattagcctatttttcttatagtatttataatcttctaagaaaatagctcctagccctccttctattgcatctgcaaatagtttacttccagctatatttaaaaaggtttcaggcttgaaatagtttctttcagcataatttatactcgttttagcaaaagcatatatttgattatctataagagagttatcttcagcttcatcagtgacaaatccgattaaattgcccccctgtgtatgaaactctaatatctgtcttaaattttgctcttcacttagtttccctgaaattatataacctatgtgtttacctctgaatataggaacatggttatagcgaaaacttctatcataaataagcttaaaacgtgaagataaatatctatcttttatacttcctgcaaaaatgattacatctgcattattaatgatatggtctaaaaactccctataaccatctttaccatcataaacacatttattttcagcagcgcatttgcagcaaccaaggcatggtccttttatatcaacctcattaagattaaggatctctacagaaccttttacaaagcttttatacttgtcaatcatctcattaagattattatcttctttagctgcatctgtaattataattattcttttatttgtatcaattactttatccgttactcctgcactatattcaaagttacttttacttaatgaattatacaatttactagttgttaaaccttcatttacaaaatcaagcaaattttcaaaaaacactttaagctcttttcttctactttccttagttaaatcctgcatctcatgagataaatattccacataattcatgcctaaatcttcagaaattgccctgatataattatgtgcatgaatatctgcataatgaatagatgtagaaaatgcagcagtatacttgtctttaaaatagctttctaatttattttcaaatatcagttcaataaatctcttataattagaatgcactaaagcatgatatagtggaaatgcccatataactgcatctgcttcctgaacctttgtgcataaagcttttaacttttcagtatcttcttcataactttttacttctttaacaatatggatatactgaaattcatgtttttcataattttgttccaaatacttcattgattgcattgtaacacttttctcaaacttcggactcccatttaaaacaactattttcataaccaatacctccgttttttttatattttcattctattagaaaacatgaattaaaaccatagattttgcttaagatgcaatttaaataaaataagatacaaaatagaacctctactcaatcctttttgggtatttctattcactggtgaaatacccggaacttatgcctttataggaggattaattgtacttacagctataagtgtaagagaattatgtataaaaaaatagttatatcgaatcttctgctagagcaataacttctacaaagtcatgaactaaaggctttgatataactattttttcttaatttgggtatataaaaaatttacaatctataattgtaacataaataatctgccatgtttttatataagaaactaatatttgaatttatcattgctcgcatagcttaacatcacactttttcaaaatccaactataatgctcccatatctctagcaatataaagagaaggatatttagtattgaaatttagttcacttttaatacgcgatgtatctaatatcatatcccattggttaaaacttggccacccaccatttggaggtacctgctctgattcaccttgtagcttataaaattcacttacagtaataggattatcatcagcaacattatatatacgccccccaataccaggtgtactagcagcgagcagtaatgcttgactgacatcttggtgatgcactactgacatcgcttttgaagggttccagttacttagaaacggtaaaatttcttgaatgtgtgggtcattatcgccataaacaaatcctagtctcataatacgaatatctagtccttgttcatgatataatccaagtaaagctttttctgcagccatttttgttttaggatataatgccgttgctgtaagaacatcatcttccatacatggtctatttactagagaattgttatatacattgcctgtgcttgtaaaaacaaatcttgtgacacctgcatctaatgctgctttagcgagtgtaatagttgcatctatattgatggctttagccatttcttcactaataccacctcgaaattgagctgctatatgtacaacagcatcaacacctcgtacggcttcaattagattttcattatctaaaagatctcctaatactacttctgccccctgttcttttaaagtggatgcaccttctaagtttcttacaagaatacgaacttcatggccttgcttaagtaaatacggtacaaatcgacttccaaccttacctgttgcccctgttacaaatattttcataaattaattcactccaatctaaatagttttgttcatcagttatttttatgttatattgctaatatatcagagttaaaataattcaaccatattgtggttatcctacgattgagagtagtaggataagaggaggaaaataaatgaaagaaattacatttcagcagtcgttaggtgaatttttgcgtgctactagagaacgccttactccagagcaggttggattaccttcacatggacgtcgccgcacgcctggacttcgtcgtgaagaagtggctcagcttgctaatgtgggagtttcttggtacacatctatagaacaaggaaaagatgtacacccttcttatcaaatattggaaagcttggctactgccttaagattatccgaagatgaacgccgatatctttttttattatctaaatctgatgagatagaagaatcaaaaatttataaagaaattagtacaggattagaaagaactgttttcgcattagaacctaatcctgcatatataatggataaatactgggatgtattattatggaatcgtgcagcagaatttttatttcgatttccttcatattctaccagcatagattcaaaaccaaacgtattacatcaatttttaattgatccattcaaaaaagaaattaatccagattgggaagaacgagctaaaatcatgattgcaagatttcgagcagattgtgctaggtatccccaggatgcaagattaaatgaaatgattgagaaatttaagcaagaaaatgaattcttcagcaagtggtggcctcgttatgaagttaaaactgttactgattgtcataaattatggaatcaccctgagattggagaattggaatttgaacatgtgaatttgcaagtatcaaactgtcctgattttaaattgatgatttatactgcttcaccttctacattagaaaagcttaaacaaaaaatatattctaccaaatgaataatacatcataattgacagctcaataataaaagatactttacattatcaatttactgtgtagatcattttcgcacatttccttaataaatacgcaaaagccactttccttctgcgtatttatttacctttcattttaaactttaagtctataacctgcgcccctactgtttaaatatgtgcaggattagaatatgagaattcaattgaaaaatacatattataaattattaaaggtaactaaatctaatttagattcagctacctttttaatttatctataattttaaaataaattttacttagtagtatcaaacataattttttaaactaccaaacctcttcttttggcatatagcctaaaagctacttcttcaacaaatgagaataaacttgtggttataaaatatattcctaaagcaataggagctttaaaagtaaccaatccacttattatagttgttattatgatgttggttttgcttagtttagcttgagcttttaatctaagaaaaggtatataaggtaatatattgggactaagcattgaaactgcatatattgcaggcactataaataaactatctgacatcttcaagctaactacccaaggtataagcgcagttccaacctgcataggcatatttaaaatcactctatacaaattaaaaactataggtatctgaagtaaacttgataaaatacctatcattccccttgcattttgcttaaagtacttttgagtctcaatttctagcttttccttattacttttatatttctcttttatttcttcaagccccttagaaaactcctgctgactatacatgcttaacttttgcttaaatgatattggcataagaattagcttaaccaatatagttaatagtataattgctattcctaagtctcctgtaatattaaaaaaataattaagtgatacgtttagtaaatttgaaatgatgttcatattcttcctcctaaaatttaaaataaataaaaaacaccatttcatttaaaactgtacacaataccgccaaatatcatatttttcatatgatatataatcatttattatcataaatcttgaataatccaagtatttaatataaatcctacttacaacattataatttagcttttttctatattttcttaaatatgtaattgtgcaagtaataatacttataagaaacactagaacaaaaaacaaatgcatagtattcattaactctgctctcataaaattacctcacgaaattctatatatgcatatagtatatcactttagaatttatttacaatgatcctagttcatatataatattaggttacacatttcatagctccaactattgccaatatattctactatataaaatcggataattatggtacaatatccaagtaaaatttaacaaccatagatggatggctgtggaggttttgaacattttttcctccttgggctattggtgaattatttcgctgtagctgagggggtggtattggatatgctagaattgattataaaatgttttgctactctttatattattagattagttttaaaacataatctttttatttctaaattgataattaagattaattttcttggaattcacatagaaattaatagcaaagagaaaaagcacccatccgaccaagaatagtgctttagtctcttcataaatttgtaatttaggtccaatagccctaaaacaaaataaatgttttaatgattagcttggtgttgacgcactaagcttttcttatttatattatatcaaattcttttagaaaaatacatatagaattgatattttaaattgtaacttaccatataacttcttaaaataaaaatttcgctttgagtcaaccctacatacatttttaaaatgcattattttacttcccataaaactttataagcttttaatgcaatttcttcatttaactggtaatcttacttcaaaaatagttctattatcatcactataggcctttatcgttccttgatgcaactctataatattttttgtgatagctagccctaatccagaaccacctatatcgctatttcttgatttttctaccctatagaatctatcaaatatgtatggtaaatctattgctgatattgactggccatagtttataacttgaactactgccatattctcttccatttttgttgttacatcaacataaaaaccatctcggccatacttaattgcattggacagcaaattttcaaatgctctaactaacttacctgcatctgcatttactattagcttatcctcagaaaagttgattcttgattgcatttctgcatttttaaattgatattcaaaatacgcaactacctgacctaataattctaccaaattaatatcaactttatctaaattaatggtgttattttgcattttagtgagttcaaacaagtcattaataagtaaattcaatgcttttgccttttcaaatgctatattagcataatatcttagtcttacttcatctttatacttatcagcatcaattatttctaaataacctattatagacgttaatggagttcttaaatcatgagaaacattagttatcaagtcatttttagtttgttgagcttttctttctactattgttatctccttaagttgccttgagatattattaatattttctgctaaattcctaatatcattttctccatcaacttctattaatctgtccaagtcaccacttgccattatttcagtttgatctataatagctaccaaacttttagtttttctataagtaataagtaaatatactcctacaaataatgaaattccggcaatcacataggttgcaccttcaaacattatagagtcaatgagtcttcgaaatttaaaaatataattaatgagttgaattttagtatttaaatataaatatattaatattttactaactatcattaagcttatataagttaataataatgtagttccaatctcacctaatggtgatagccaatatttatagaatcttttatttttcaattttatatccaactccccatatagtatgaattatcttatttccttccatatgatgttctattttatcccttaatctgctcatatgtaccataacagtattattagattgataatatctttccttccataccttttcaaaaatttcctccgcgctaaaaactcttcctctatttgtagctaacagatataatatttcaaactctctagccgttaaatctacttctttatcatctatagtcaccttatgcttactcttatctataaccattgattcaattcttattatatcctctgaaacttgcatttttaaatttaaaaaatatgatcttctcattaatgccttaactctaactataagttccaattggttaaaaggtttgcatacataatcatctgcaccagtcataatcccttgaatcttatccatatcttctgattttgcacttagcataagaattggtatgttatacttttcccttacccttctgcaaacctccagaccatccatgtggggcatcattatatctaaaactatcaaatgaatttcttccttctccaaaatatctaaggcttcctctccacaacttgccttaaatacattgtatccttcatttctaagatttatttctagcaaatttcttatttctttttcatcatctactacaagaatattattcatttattcctccatttttataattatttttgtaagtattcctctaatgtaattccattatcatgaatatacttagcagcttccttacctacatatctaatatgccatggttcatattcaattcctgttacacttttctttccataaggatatcttataataaaaccaaatctatagcaattttttgcaagccaatctgcctccttagttccctttgcaaaatatccgtttttattagtaatatcaatgcacagccctgtttgatgctcactaaatccaggtttagctacatatgcatctgcaagctttttcccttgagatatcacacgattttcataaatatcttcttgtgactcataagatctataacccgaattaccaagtaatattatcccgtcttttttagccgcatttactaattcttctaatggctttacaacagttcctgctacgtgtttttcttcatcatctgatccatttgaaaatggtatgttaggtatgcttaatccttctggtacataattcccacttaatccatgcttctcatttactaatagtattttttcgcttccattagctgtgtttacttcaaacaacttgtctttatcatttgaaccataattacttgtatttccttcaatataccaaaatccgcaaattattatcatcgtcattattataaatcctgatatctttttatatacttttctcatatcttctacttcctttcaaatgtcataatttcattgtagaagatagactttacaagaattataaataaaccttacgaaatcttaagttttaaaaaacttaccttgactaaaaaaaatgccaatactattcgaatagcattagcattttttatcatatacaaatttaacagaatataagatacccaattttacttacataatataattttttgtgtaattgtatctaatttaaatgaacaattatactattaaattaatttttatattagttccttcattttaattccataaaattgttttattaaaatacaattttcaatgttaaaatatcttctttaatttctgctaatgctttagcatttattctttcagctaatagcttcacaattgaaaggcctaaacctgtactgccagaacttcttgatttatcccctgtataaaacttttcaaataataaatttacatctatttttttaggatcttcaattttattggcaaagcaaagctcaacatgttcctttttcacaagtgatattttgacataacttgaaccgtatttcaatatatttgatattaagttttgaacaatacgctgtagaattattttatctccttcaataaatattgttgtatttggcaaatcaaaaatgggctcaattccagcttctttaaatggcattatattttggagcattgcatctgaaagaaaattattcatattaattttttctaaatttatatgcattctatcattttcaataatagttatttcaaaaaaactagtaatgagattatgtaaaatctcagatttcttttttataatacttattttttctttttgattttccgacaattcacttttttctagtaattgtagataaccaattatagaagtaagaggagttcttaaatcatgagatatatttgcgatagaatccttaagcttttgctcatttctcaacacctctattcttagctgcttttgataatttatatttctattaatgttacctgcaaggtattcaatatctttgtcaagcaacgatacatctatcttcttttctgttttgccttctgaaatattttctaattgttttcctatactttttatttgcatctttaaatgaaatacataagaaattaataaaataacagtaaggcttaatatcaatataatcagcattatacccatccttatataataagtttattttaattcacatttacaaaatatattataacttaacattattataaaccctaataaaattataccttctaaagaaaatgatataaattcaaatgctgagttattgtttaaaatcactctaagcaaattcattggatgcctatataatggcaaattcatacttctggcaacaaataaatatatagcattcataagaattgtaataactgatactataatagtttttaaattatctctaaatattactccaaaaagtattattacagaaaaaatagctaaatataataatgttgtacaaattaaaattttcattagtgtaattacatttactccacttggtgcattaaagccatactttatagtaacagcgaatgcaccagaaaaagaaaagataagcattgatacagttgtaataataagtattgaaacagcttttgtaaaaaaaataatacctctactatttccagatgcaactttagtaattaaagtcctatttgaaaaactttttcctattagcaatgctggaaaagctgaaattaacatgcaggttcctggagcatcatggagcattgctagtaacacttcatatcctcctataggtaaattataataattcatttctaaatctccataacctgaatatgctccataaataatagcaattcctatcatgagcaaacaaatataattatgtctaacctcatagatttccatttttaataactttctcatttactacacttccttttattttagctctgcttttttaaagaggacgtatgatatgctcaagaaaaataatattgcacaaataccaattagtcctgcgtctttaaattgatttggaattaaaggcctatacaagataaggcgtgcctgtgctaatggtagatacctaaatatagttgttcttatatcatttgttgagtttaatagagagatatttataaaatatattacaactgaaattcctgttgcttttccaatatctctaaacataaaagctatgaacacacttacacttgacatagccatccctaataacgatgttattattattgttttagctaaaatatttccctcatttataaaatatcctgtagtatatctatgtaagataatgttaagaatcacatttacaattgggctaaacaaaataactaaattaactccaataaaatatgctgacaccttgcaaacaaatattttaagcctactatgacctgcacttattccgttatttatagtcctatctccaaaatcacttccaaaagaaattgccccaagtaatataggaaatatcattaataaacatgcataataaaagcttacacctatattttcatatccagttatgaatgtattgctatctggagtcattgtaattccaaaaagtgtactcatgataaacactagccaaaagcttttacttaaaaataatttataaacctctgttctaaacagattaatcatatttcctgcctccaattcttctaataaagtaatcttcaaggctatctcccgccaaagaaattccggttattattaaattatttcttgataatgctattgaaacagatttaatatcatctaaataatcatataaacgaattgttttgtctggcattatttgatagttatttgtatgaagctcttcttctaatatagtagctgcaatagatacatcatctatattaattgcaatatgctttttacacttttcattaagttcttcttgtgttaatgactccaatatctttccattagaaataataatataatgatcggcagtttgataaagttcctctaaaatatggcttgagattaaaatagtcattcctttttctttatttaatcttttaataagttctcttatttcaacaattcccacaggatcaagtccatttacaggttcatctaaaatcaaaaactctggatcattgatcagtgctagagcaattcctaatcgctgcttcattcctaaagaaaaatcctttgctttcttttttcctgtatgttttaatccaactaattctaaagtatcttcaataacctttttatcgggaattcctctttgaatgcgttgaatctctaaattttgatatgctgtcatattaggatataatgcaggagtttctaccatgcaacctagtcgctttctttgttcttgtaatttcttttccccagtttgtccaaataaataaagttcaccagatgtaggaaatgataagccagtaataagccttattaaagttgtttttcccgcaccattttgtccaacaaaaccatatatatttcctttttctaattttatatttatattatccaaggcttgtgtatttttgtatctctttgttaagtttttagtttctaaaacataagtcataataacatctcctttgcttttccatatttacattgtaaaaatcgtacttaaagaaaatcttaaatcaattctaaagaaaaccttaaatattttctccataacaaaaaagcaggctttactcctgcttatatatttctttttatttgttattttaacttataacccattccccatatagtttctatatattcttcattgggatttgcgcttttaagcttatttctaatattacttatatggacatttagtgtattatcttcactaaaatattcttcattccatatactttcaaataaatttgcctttgaaaagactttttgtggatgacttaataataaaaataaaataccatattcctttgaagttaatacaagtgtatttccgtttactattactttcttttcctcttcatataatataatatctttataagttaaaattgatttttttatatttgaatctgaactacagcgccttaaattactctctactcttgctaatatttcatttaaatcaaaaggcttggtcacataatcatcagcacctaaacgtaataaatctacctttgtatgtaccatatcctttgcagataatacgatgacaggtatattagaaaagctgcgcagttcccgtaaaatctcatctccacttttatatggcagcattaaatctaaaataactaaatcatacgttaaagttcttaattctctcataccatctattccagtattagatatctttatttcatatccactttcctttaaaaattccttaagtagattacaaatttctaaatcatcttctataattgaaatcctttgttgcatatcatcaccaaccaaattactacttatttaactaaacctgtataatgaatttaactataaatacaatagtatcattcttttaatattgtttcaaatccatattggtttaaaatagtcaatttaccaaacgcttaattgttatcttttatttagataacactaatattacatgggaaaatcttatggataactataaaatcatcaaatgttttatcacaataaacaattactatccaactggtagaccagcatatttcctaaatctactagtttgataataaagcgaatgaaactagtttcctttaatatggaaaaaagagaatcacctcattctgagtttgattctctttaattattttaatttttaagttgtaatttgtgtatagatagctaatttaagaattcaacttattaaattaacatatttacaaaattgctagaactttaagcttatatcttaactagaaatcataaatatatttgtgtagaaaacatttgaaaatgagctgttaaaggttcttagctgtaggttgttccgttttagcttgtgaagtgagggtccaaaattttattttgggttctcgaacttcctcagcgaatgtaatgagtcgagcttccctaggaaagttggagcatgctaaagtgggtacaacctattgcttagaaccttcagcgatattttcatagcttttcggaatcaaaatatttatgatttggtaagtagactagggaatcacttccctaacccctctcagaaccgtacgtgcggatttcccgcatacggctccccacattataattcacagtatatatgatatatcttcttttaagttgaaaat

SEQ ID NO: 88 - DNA, 25186 bp, Clostridium beijerinckii
ttactcctttaattgctatgccatgcggcactacaatcttatgcggtattaatcttcctttcgaaaggctattcccctctatgaggctggttacccacgtgttactcacccgtccgccgctaatccactcccgaaggagcttcatcgctcgacttgcatgtgttaagcacgccgccagcgttcgtcctgagccaggatcaaactctcaataaaaagtttaatcttagcttactcaaataaaaattgctggtttacttaaatgtatttatgttattctgttcaattttcaaagaccaattttctttccaaagcctgttgttacaaggctttacaagtttctgtcgtttctgacagcttactcagtatatcatcgctttcagactttgtcaacaaccctttttaaaacttttcaaacattttttcaaacactttatcagctttaagttattgaatttcgtactttcagcgacgaattacatcataccattactatttattctcgtcaataacttttccatctttttcatcttaaatttatgatagttttgtaagatatagttgtttttaataactttatcttttactacatattttctctttacactattactataaccattggctttaaatttatactataaaattaaattatttttataattcttaaaaattctatatttatctgaattatagtacttagttatgcattagtatcagtcgctttgcataataatgacttttctttaactttgcattataaatttctcatatatcttagtaatccaaacttattgtatacaataacttaaaaatagaatactctacagattacctctaattgtattctattttttattaacacataaaagataataaaaattaataaaaaaaataagtttccatgaaatatgaaaacctacttgttcttaaaaaatattttaattattattccttggtataaatccttttataattaatgttgaccaatcactattaggattttcaatccactcacattggatatcaagaaacttaagccacgcattaagtccatgactttttttactgatatttggtgactttcttccgtgtatttcttttatatcttctaataatttaacttgttcatcttttcctaattctttattaaacaattgctttaatatttctaaactctcattataagctacagcatcacctatatacaattcatccgcatatacttgtctttccttatttaataaatcacttatttcattaatttcatctttatttgataaatattgtttaacccttcttaaggcttcaatatcattatctaatttgtttatggttttttctaaactttcaaatctcatttattcttctcgctttacattttatattttaatcatcaattacttaatgaaaattaatttattataacattaatatttatattttatctatataatttaaataatctctaataatttataatttcaaattaattttatcataaagatgaactaagtattcaacattcacactgttatcaattagtttatcaattctatttctagcaattcctaatgtatcccttgcctctcttaaatctttatcctttacgcaattatttgcatatgttaatagataatctatttttagaacatcttcagctaaatcttccctatcagcatttactagttccactaataaggaatacactttaggagatgttgtatttttagtatcttttaatatatctgtatttctgctagtcttttttgtcataaacttaaacacctcatttcctcaaaattataacattattaattacaatttactatttatattcaatacaccttaataaaactattttttaactgatgtattattatattttactcctataaaaaattcatatccagatattttatagacttctttatcataaactttattttcaacataaactatttcataaatcaatcatgcaaatagtcaaccttacaattccataaggttgacaaactatttttatatgctatatactggaagaaaaattagatggagttataaaaatgttattacttagaccacatcatataaattgcttatttttttatcaaggattaggatacagtaaggattttacaataggcatggataaattggtaactttaattaaggaaaatccttattctaaagttatgttcattgtaggatgtgatatcctatgtaataattgtcctaatagacaagttaataattgctgcatcactcaaaataaagttaatgaattagattataatactttacgaacatacaatatcaaagaaaataaagtatatacgtttcatgaaattatagatactatttacaaaaattttagtgaagctaaatttaataaaatatgtagctcatgtaactggtacaaaaaaggaatatgtacgcaaagtataattagctgtcaaattgaaaaatgggacttataaagcaaatatccaatatatacttttcactacttcagccagtttaacataaaaatatgaaatccactttatctttacgataaggtggatttaactgaaaatatcataataataaatatgatatttttttatagctcatattaaatatactttatattatttaagaccatcacttaaatctttcacgaaatctattactgcttctttgccttctgccattctcttcactattgcactacctacaattaccccatcacaatagtctttaacttcttttactacctcttttgacgaaattccaaaaccgatgcacattggtatatctacgttctttctaacttcttctaaatattcatgagtgccagaatccaaagtttttctttcccctgtagttccatttgtagatacacaatatacaaaaccttttgccccttttgttattgctgctattctatcttttgaagttctagccactagaggaattaagtatatgccattatcttcacaaattttatcaagatctcccctctcctctagagggacatctggaactataagcccatctacaccgctttttgccgctatttttaggaaattttctactccagtaaagtatacaacattgaaatacaccattaatacaatcggaacttctgattttccccttattaattctacacatctaaatacgtcttttacttttgttccattttgaagcgctttagtatatgcattttgtattactgggccatcagcaagaggatctctaaaaggcactccaatttcaactatagttgctccttctttttctaaagacactatcaaatcagctgtttcttcaaccgtgaaatctgccccacatgttacaaaaggtattaaggcttttctattttcttcttttactttattaaatgataaatctattctattcattatttttcacctagatatgcaagcacagcatccatatctttatctcctctccctgaaatatttacaattatgattttatcgctgctaagtgtttgtgctaattttttagcatatgctacagcatgagatgattcaagggctggtactatcccttctattcttgttaaatacataaatccatctcttacagcttcttcatctgttatgctttcatattcagctctattagtttcagctaaatatgcatgttcaggtccaactcctggataatcaagaccagctgatattgaatatgcttcaagcactccaccatcattatcctgaagtacataactcaacattccatgtaagattcctttttccttctttgtaatggttgctgcatgttctccagtttcaatacctttacctgcagcttcaactccaataagattaacttccttgtcgtgaataaatggataaaatattcctattgcattgcttcctccaccaactggagctaagatataatccggtagccttccttcaagctctaatatttgctttctagcttcatcacctataactctttggaaattcctaaccatagttggatatgggtgaggaccagcagctgttcctaaaacatagtatgtatcttctacatttgaggcccaatatctaattgcttcagttactgcatcatttaatgttcttactccatttaatactggaacaacttcagcacccaaaagttccatcttcttaacattcatagcttgtctctttatgtcttcttctcccataaatatcttacattccaagccaaactttgctgctactgtagctgttgcaacgccatgttgtccagcacctgtttctgctataactttcttcttacccattcttttagctaagagtacttgtcctaaagcattattaattttatgagcgccagtatgatttaaatcttctctctttaaataaatttttgccccacctaaatcttttgtcatattttcagcataataaagtggacttggtcttcctgtataatagtttaaataatacatgtactcatccataaattctttatcatctatcaccttattgtaagcatcttcaagttcaataagtgcattcattacagtttcaggaacatattgccccccaaattcattaaatctacctttcattacttttccgcctttcttgattcaattaatattaattgctctcactttttcaattaaacttctcatcttttcaaaagattttgttctagttccatcttcatttgttatttctatccctgatgaaacatcaattccataaggacttactttcactattctttcagctacattttctggtgttataccacctgccaaaaagaaactgcaggtattgttagttagattacaattattttccttgttagaatctacttttaataattcgcatatatcttctaatggaaaagtttctccactacctggtttatccccatcaataaggatattatcaattgaatctctatacttatgatctgcatattttcttatattttcagcatcgcttattgataatgctttccatatacttactgatttctccactcttgcctttaacgatgatataaagttttcatcttcttttccatgaagctgaataatatttaaaggtagtatgttaattacatctagaatttcatctatagaattatctttaaatactccaacgatttttatttgtttatctaaattattagataactgtttagcttctcttactgttacctgtcttttactttttgtaaaaacaaatcccatatattctggctttaatatatttaaatatttaatctcattcttattagttatcccacaaattttaacttgaatcatatcaaatcctcacataatctaatattattttagatttataaattacttattatttctaaattctttatatttagctttaaattcagaatcatttatttttctcataaataattctccaattaaaactccatctactccatattccttaattacattcaaatcttctatactcatgattccactttcagctattattatcttatcttttggaatacaccgaattaattctttagttatatctaacgaaacattgaaattttttaaatctctattattaactccaataatttcacaatcatatttaagtgctaaatctagttctgccttattatgaatttctactaatggttctaaattaaatctctttgcttctttgtaaaactcccccaacctttcacctaaaacactagcaataagcaaaattccattcgcgcccaaaactttcgactcataaatctggtagaagtcaattataaaatctttacgcaatattggagtatgcgaaatttttctaatttcttttaaataatcatcacatcctaaaaagaaatcttcttcagttagaattgaaaatacatctattccaatatacgtataatagtttaatatttcttttatattaaagtcctctacaataatgcctttagatggtgatgcctttttaaattctcctattactgataacccatcttttcttaatacctttataaaaggatttctaaaacttgcttctacttcattttcaactctaaataatgcttgtttttctaattctttcataggaatttctttttttctcttctctacccttatttttttcatttcaataatatcatccaaaatcaaaaacattgccccctttattattatttaaactatcacttgcaaactagaaagttcctcatactttttataagctgctctcgaatcaatgagctctgatgcttttttaataccatcttctatggaatcaactaagttcgctacgtataatgcggcccccgagttcaaaactacaatatctcttttaggacctctttcccccttaagaattttaattattatttctgcgttttcttttgcttctccacccttaatatcatctaaagtagctttcttaaaacctagcttttctggatctagtttgtaatttttaatttttccatctttaacttcacatatacttgttgatgtagtaatcgtaatttcatctaacccatcatcaccatgaacaatcattgctctctttaatccaagatttagcaatacttccccaatatcctctagtaaagctccatcatatacgcccattagttgcccagtaattggtgctggatttgctaacggccctagtaaattaaaaattgttcttattccaagttcttttctttcttttgatacattcttcatagcaccattgtattttggtgcaaatagaaatgccattccattttcctcaatgatttttttactttgaatttcatcaaaatcaatatttattccaagttcaactagtacatctgcacaaccacttttactcgaaactgcgcgattcccatgctttgcaaccttagcaccaccacttgctgcaactattgctactgctgtagatatattaaaagtttttgaaccatctcctcctgtaccgcaggtatcaatcaaatgttctgtgttttctatttcaacttttaccccattatctctaattgctttaactgcacctaatatttgccttggagtttccccatttactctaaggccaactaagaaacctccaatttgtgacgaagttgcttcccctttcataatctgattaattacacctcttacttcatcttcagttaattcttcccttaaagccaacttcttgattgcatcatttatgatcattttaatgcccccttaaaatttataaaattgcttatttcagcgctttcacatttaatatcacattctttaatatttaattttaatcgcctaatgtgtccccacaaatattaatcacaaaatttccaataatatgtttaccttttgctgtatatattgattccggatggaattgaagtccaaaaacgttatattccttatgcttaagtgccattatatagttgccttcaacagttaaagctagtacttcaagacagtccggaagtgaactattctcaactataagcgaatgatatctcataacctctaattttcttggtattccttcaaatatatcctttccttttacttgaatttttgatgttttgccatgaaaaatttcgtttgctctaattacttttcctccataagcttctgcaatgctttgatgcccaagacatatacctaagataggaatcttatttcccaattcttttacaacatctatcgatatacctgcattctctggaatacctggtcctggggatattactataccttttggatttagttctctcaacttctctacagttatttcatcatttctaaaaaccactgtttctgcaaattcacttaagtattgatataagttaaatgtaaatgaatcataattatctattaaagcaatcatcttaaagcctcctttaaagccattagtttactttgaacttcttcaaattctttttctggaactgaatcatatactattccagctcctgcctgaagataagctgttttatcttttaatattaacgtccttatagagattgctgtatccatatttcctccataagaaaaatatccaacggcccctgaataaattcctcttttgaaatcttcaagatcttctataatctccatggctctgattttaggagcaccagatactgttcctgctggaaggcaggctgctaatgcatcaaatccatctaaatcatcttttatatccccaacaaccttagtagtaatatgcataacatgcgaaaacctctcaattttcataaaatcgctcacattaactgttcctatcttgcttactttacctatatcatttcttcctagatcaacaagcataacatgttctgcaagctcctttttatcttcaattaattctttttcaagtgcattatcaatttctggagtttcacctctttttctagttccagctataggatttgtaataacttttcctcctctcaccgatactaaactttctggtgatgatcctataacttgatagctatcataatctattaggtacatatacggtgaagggttctcttctctaagctttctatatatctcaaaatggcttttttcagtttcacaagtcattctctgtgataatacaacttggaatatatcgcctgccaatatatgttcttttgcttttctaactttttcttcaaaatcttctttggatgtatgaaatctgaacgaaacatctttctttcctttcgatggctctgttactatcggcttataaagcagactatttatatattcatattgtgattcgattatttcatcatactctcgagcatcgttttttaatatgttgtctataatataaactttatgagtaaaatgatcgtagcaaatatatctgttataaaaattaaatcttattataggaagctttaaatcatctttgttattaaaattaagttttttctcataaaactgtatggaatcatatcccatatatcctatagccccacctttaaatgaaaaaatattagtactattatcaaactttaatctactttcttttttgagttcatctatttcttcttttccatccccacaaatttctttatagggattttctcccaaaaacgaatacctgccgaaataattttctttacttccactttcgaaaataaattttcttttacctttgaatccaccaaaaattttaataggagtaatttcatctcctctaaattcacttattaatgaaaatatatattcatccttctttttttgattaaaagtttcctttgaaatattaatcatgattctccccccaattttagttaaattatataaaaaaagccactccatcccgaatattgggacgaagtgactcgttatgccacccaaaatcaaatacaatctaaacggtatttctcatagctactttaatctttaaataatagtcaaatttaatatggcgaatagtaaatacttttacttctaactctatatttaatagaattaaaagtattttataagaacaaataacatattaaacttattaaaaataaaaaaacatcccgtcctaaataggacgaaatgtataaatttcgctataccacctaatgtatatatgctatcagatactattatgaaattcagtcaaacacaaaatttcctaattatatcctgtcattttaacggctgacttcccgtacattcctactcttaaaatttcaaaatgtcacctcaaagacccattcaataatatcttcagtactcgactctcaccaaacatcgaactctctttacactaagttttattatctactattcttatcaaaggttttaatttattgaacttataataacatagtcttaagaataatacaagcccttttaacatagataatttatctataatattaactaaaaacattatagaaatatataattcacaataaatatttaaattgaatatactaccttagtaattaattatccattactctttctaaattatttatatttcaatgaaaggagttttcatatggaaacagcatatgatttatttaaaaaattacttgtagttatggccgatatagatagaattttagatgaaaaatctaagataattgactctaaacgtatagaaatcttagataaaaaaatagattccttggaattagaaatgtttgaattaaaaaacaaattaaaaagcattaagctaaaataaaataagcctacagtaatggtaggcagtacatatttagtagcagtaaatatatatctactgctactaaatcatgattaaatataatacatatcttctttattgtattttttataatcattaaccaaatcctctaaagttatagaattgaaaaaattaattattttattatttataacattccacaaattttcgctcataaaattttctatttcattttcatcattctctatatcaattagaagtaaatcaccttctagaacatttaatatatctccaattgtaaattctctagaacttttagccaaaaagtagcctccttgagctcctttcttagcatttataatgcctccttttcttaaagaagaaaatatttgttccaaatatctctcagatattccttgtctttcagaaatactttttacagtaaccatctctgaaaccgagaatatacaaatatcaattaatgctcttaatccatatctaccttttgttgaaatcttcataaaatcaccgtatcttgcctttcttctatatttaattatattaagacacatttagaaaatcaactattaaaagttttgttttacatacgattttcttcaaatctttctttataaatatataaaatactatctttttcccataattgtaaatacattttattcttcctattataatttaacacattttattattttgtaaaactcttttatatagtagattgacttttaatgctagataattatattataaagaatagtgtctaacataaaaagaaatacttaaattgatactttatttgtaaattatgaaaggtatgaaaataatgaattttaaacaattaggtcttagtgacgatttaatcaaaatactaaataaatcagggattgctgatcccacaccaatacagaagcaaagtatccccaaaataagagatggtaaagacgtcattgcagaagcagctacaggaactgggaaaacccttgcatttttacttcctcttttagaaaatataaattcaaaatctaatgaaattcaggctctcatattgactccaactcgagagcttgcaatacaaataactaatgaagctaacaaactcaaagaatttaatgatatcaatatattacctgtttacggaggtaaagatattgcttcgcagttaaaaaaactaaataataatattcacttaattattgcaactccaggcagactattagatcatctagaaagaaaaactatcgacttaagtaagttaaaaacttttatcttagatgaagcagatcaaatgttactaatgggatttaaaaacgaagttgaatcgattataagtaagatgcctagaaaaaaacaacttctttgcttttcagctacaattgactcttctgtaaaaaaactagcttatagatatatgaaagatcctattgaggtattcataaaacaagatgatatagctctagatgctatagaacaagatattgttgaaactactgatagaaaaaaacgagatgctttatgcaaagttctagatgaagataatccatttatggctattatattttgtagaacaaaaagaagagttgatgaacttgaagcagtcttgcatactcgtaaatataattgcgaaaaattacatagtgacatccctcaaaataaaagagagagaataatgaaatcttttagaaatgcagaaattcaatacttaattgctaccgatgttgccgcaagaggactagatataaatggaataacacatatttataattacgatattcctgaaagcgtggaaagttatatacatcgtattggtagaactggaagagctggcgaaagcggctatacatgcatgtttatagatccaaagaacataaaagacgtcaacgaaattgagggcgcaattggatttaaaataagaagacgaaatgtagaaatataaaattcagaccactagcagttttgaaaatactaaatcaaaattttgtgtgagtaaaagtcctctactaaaaataattttaaacttagtagaggacattttttaataccattcttaaatatataattcaattcatatttatctaaataagcctttgcatcaatctatgctaattatatatctggtggatcctaaaataagtaaatacaacaatctgttatttatataaatctcctgctaaatacaataatttatcataatcctgaataaaatattccttattatctcttttcaaaatcccttctaagcaaagcttattcaatgttctacttaaatgcctataacttgttcctagcaattctgctatttcaatataattttctctaaatacaatttttctagtatttgaattttcaatttcagagaatgctattatataactagcaagcctattttcaagtggatataataagtttattgaagtattagtactgctatttgttaatttctcactcaaatagctacataaattcaccaaaaacttacaatcatttattagaatttttcttacaatatcaaatctaattcctatacagtaagtgtccttaattgcttgaacactgcaatctgttggattatttctcacaaattcagcatctccaattattgtaatcggactataaaatgatattaataatgatttaccattttctagatgcttagatactttagcttttccctcaactaaaaaatacatattttctaaaatctcttcttccctacagatatattcatttttattaaacatatatagttccatatatcttcccatatcttctgaaaataggttttctaatttatttttatttatatattctgaaatcctaatattatcttctatctttatcaatgaagtcaactcctaataaatattgaataaaaaaattaattttaaacatgacatttgtcctatataaatctcattatagtaatttacaatataaagagcaactttcctatcaaaataactcttaaaactatttataaacaaaataataaatttatttaaggagatagcacttatgtataatattttatcattactaataggcgtacttataactattatgattgctttcaacgctaaattatctgacggacttggcaactattcttctttaattgtaattcactttgtaggattaataattgttataggaatagtcatctttaaaaagattaaaattacttttaagaataatttaccattatatctttatattgctggggctattagtgttttcaccgttatgtttaataacttaagctatgcagctcttggagtttctcttcctgttgcattaggacttctaggccaactattaacttcattagcttttgatcactatggattcttagatgtgccaaagtctaattttaataagaaaaaatttataggcctcttagttataacagctggaatctttatcatgtcatttttttaaaagaaaggagcaattattaatatgttttttgttttaatttcgatagcagctggcgctattgtagtaatttcaagaattctaaatactagactttctgagaaggtagggttagtacaatcaagcttttttaattatattactggtttagttgcatcaatattattatttattattataaaagataaatttttacttgaacaatttcgcactcttccactttatgcttatttaggtggtctattaggagtaattgttgtcatcttatctagtgttataacgccaaagatgacctcattttatgccactttattaatatttattggacaactttttactggaatcattttggattgtgtgatacaaaatactattccattagccaaaatcatcgggggacttttagttgtcttaggtttagcgtacaatttgcatatagatgcatctacacaagaacttacagaattagatgaaaatattatataggctaatctacaaatatgtaattataaaaagaggtaacatacaaaaacaaagtgttacctcaaaatccacatattatattttacagtgtttatcctataaatacatatttaatccatttaatttaagccattcatgtttttctttataatccggcattatttcatgaactctattccagaaatcctttgaatgattcctgtggtccatatggcacatttcgtgtacaacaatataatccaaaacatcaggtcttgccatactacatctccaattaaatagaataacatttttccatgtgcagcttgcccatcttcttttttgttccttaactcttatacctgtaaccttgtctctaaaattctttgaataataacctattctttgtgtaacaatctccaaagtttcttttctataccacttttcaaatgctgcccttaatttttctatttccattgtatttgtgtgtattataaaacatttctcctcattactgatatctatatctcctaatagctctttaccatttctatatacattattaaaatttccactaagttgaatatatatgttctttattttttcatcaaaaattaatttaaaagaatactcttttcctaaatatataaatgtgctttctggtgtaaaatctctcttagtcttttttgaatttctttgaatcatttctttctgcttttcaaaaatccaatctgacctttttctcacaactaacataatataatctttgctagtttttaaaggagcactaacaacaacttttccactttcttcaattttaatacatatagtttttcttttcctacgaattaactcaaattctataatcttcttttcaaactccaatttatatttcattttatctccaaattattaaatttgcattataattattaaaatgagtaattacctaaatgcaaatttactatagtaacttatttatgcatcaaattcaatatgcatttcctcatcagctctatcccatgtgaccaaatagccttgaccatgcgaacaaaatactgatgttgacgtatattcaatatcagcgtttttattgtatgctttagtttctattacttcttcactattatggcataaatcatatccatcatatattaagtttatgctgcctttccctcttgtaaaagctataacttccatactgtaatccataaatgttgatactggtcccctcccatttattatcactttattttctagcatttctataggttcaaaagttccacttagtttttgaatatctgctaaaattcttccaacatgttcattagaggctcctattacaaatttataatatggttccaatagtatattataagctttctctaatccttgccttaatgccctaaatgttgcctccctaaaatcccccccgcaagtatgcttattatgagctcttccagttaatagtgttaactttatatctgttatagacgatcctgttaatataccatgatgctctctctcaaaaatatgcgttctaattaaattctgatttccttgagtcaaatcatcgtcatgacatttattttcaaaaacaattccactattccttggcaacgattcaagtttaagatgcacttctgcgtagtgtcttaatggctcaaagtgtccacgacctatagattcttctgctatagtctccttataaataatttgacacttaccaaaatcaactactaaaccaaacctttctttaactagctccttcaatacctctagctgaattttccccattacatgcacatggatttcttgaagaatttcattccatgtaacatttagtgatgggtcttctgactctagcaccttgaaataccttaaaatttcacgagcattgcaatttttatcaaaaatcactttagacattaaagctggagtcatttcgtattgtgttttttcttttaggtccccaataccatctcctgctactgcctttgaaatacctgtcacagcaaataaatctccagcttctacaacatccactgctttaaattttttcccattatatattcttatactgcttatcttctcagtaatttcgttagaattttcttgtacatgatctaattcttttacgaattcaccaccatagcttacttcctctctaatctttaactttccttttaaagctttaataaaagttacacgatttccattttcatcatgacgaattttatacacacgcccagaaaatttttcattacttttatactctgtatatgttaatttatcaataatatttaggaattctattattccatcatcttgaagtgcagatcccccaaaacatggaaatactttattttcttttatgagtgatataaacgtttttatccaaagatcataatcatagtttccttcaatatatttttctaaaagtccatcattatgctcacttataaattctattaaatactcatttaaattgaactcatcaaatttgtttatatcatctatttcttttttgctgtcataaataaaattattatctatataacacgcatcactcgataaatctctttttatttctcttataactctatctttatctgctccagttctgtctaatttattaatgaaaaatatagtcggaatcttatattttcttaataaattccacactgtctttgtatgaccctgtactccttcaactccgcttataatgattatcgcataatccataatttctatagacctttccatctctgtgctaaaatcaatatgtcctggagtgtcaattaagtaatacgtagaaccattcagttcaaaagtcccttgatcagaaaatacagttattcctctttctttttctatattatgactatctaaaaatgagtctttatgatctactcgtcctctatttgttatacttttagtatgataaagtacttgttctgaaaatgtagtcttccctgcatcaacatgtgctaaaatccctattgtctttttcatcaaatcatccttatagtttatttataaaataattatttaccttaatcttctattagtatttacttagagtatatcacataaattatttggaagtaatataaaacaaatgcacaatattcaactaagtaatctcaaagaaaaaacataatttaaattttatctataattatcataataattattatataaaataaatttcttcttcccgtaaaattatttactgaaaattgtgcattagtattaatacaaataatttagttctaaaaattattaactattctttattttaagttatctataattgtatttcttatattctctgctaaattatactcttcttctttagataaatttttagtatcaatagttttcccaaataccacttttatttttgtaggtttaaatttcctagtatcttcaaatgctctagaagccctatctatacttactggcactatcatagcttgagatttagttgctaatttcaaacttccttttttgaattgccctacttttccttctttatttctagttccctctggaaatataaccattgaacttccattcttaatattttcaattgcttcatttattgatgcaatggcagctcttgtattacttctgtctaaaggtacacatttactctttttcaaccagtaacctagtattggagtttttagcaattcccttttagcaataaatcccatcttcttattcacagtataaagcaatattattatatctaatatacttgaatgattacctacaaacacgcattgctcttcaggtatattttccgtgcccgtcacatctaattctattcctattatttttaaagtgaatttactccaaagatatgcagtttttcttacatactcctcagcagattcatcaccctgagttctcaaaataaatgtatgcttaactccttttatccttacccacagcatataaaaaacataacatattttttttaaaaacatttcttgatttctcctttttctttcgtctccaattattatataatttctaccatattatactctttttttattacattggctatttatatatgtaaaaattatataatttcattttttaaattcacaactaactcaaattcatgttaatcttcttactatcaagtataacatcaaaaccatatacacatttagattaatgtactcaaatactaaaagtaaaaaaacataaaactaatattcataatcggttttatgtttctcctggattaatcttcattaaaatttaaagttgttttatacctatcaaagccaattatagttttatcgaaaacttcatttgcattatttaagtattcttccggctcgttcatggccgttccaaaatgagttaataaaagttttttaacattgccttttagtgctaaatcagctgcttctctaaaagtcatatgtttatttttaatagctttaggtaaatctttatcatctccataagtaccctcacaaatgaaataatcactatcattaataaattctattatatttttaattggtcttgtatctgtaattatactgacttttattcctttcctctcttctcccgttaccatatcattagtatataaagcaccatctagcacaatattttcttcatttctttgcaacctattccacagaattttaggaactttatttttttcagctttctctacatcaaattttggctgccgtttaaaataaaaacaataacctatacatggtgaagaatgatctaactctagaactgatatatctacatctaaatttatattaccatcaaataatttaaaggtatctttaggattttctattatattaatttcataaggcaaccaatttgctattactcttaatttttctactgtttctcttattccttctggtcctataattgttatgggttcagttcttccactattacctatcgttccaagaagtcctggaagtcctacaatatgatcgccgtggatatgagtaatgcaaataacatctatagacttaaatcctgtatttgatattctcattgatacttgagttccttcaccacagtcaaccagaattttccttcctctatagtttattagtgtagctgatagaaatctattgggcataggcattccacctccgcaacctaataaaagtatatcaatcatctaatttcacctcctttatgtaaaatacattaaattagcttgtctaaaagcaagtaaatccaaaattatctagtgactattatgtatatctctagtaaataccaagtccgcttcattagataactcttcattaaattcataaccatcgtgattgaattcttttaattcttctaaatcttctatcttatttcttataataaaagaggtcatcagccctcttgctcttttcgccattatagttattattttatattctccatctctatattccttaaatattggtgttataacccttatgtctcctattgttttaatatcttctattgctttaaaatattcataagaagctaaattaacaatggcattattttcacgtctttctatatctttcataatattacctattaatttattcccccaataatcatataaatttttaaacccaccaatacctagccttgttgccatttctaacctataaagatttattccatcaaaaggctttaaaactccataaagtcctgataagattcttagattatcattggcataaaaataatcttccatcgtataactccctacatcaattcccttaaaaacctcacctttaaatgcaactagacactgtctcgcagattctaaagactctgaccaattttgaaatctttgggtatttaatttagctagcttaggacttattttcataagcttttccaaagagaaattatcatattttttcaactcctcaactaattctctagcctcatttaagaaatatggcttagtcattggtaatgtctcattaaacttagaaaaatctaaagttttagctggggaaattattatcatcattaagtttctccgcctttcatttataatatacttcttctagttaatataaatttagtattaaatacttactttgtgctgttcaagttacttttgaaagttttattcgtaatgaatttattattttatggccttattacttatcaaataaacctccaccgttacccacttttacacctttagaatgttttcctataactttttttgccctttgattatttttactgttattatttttttgcttcttttcctcaattatttttttcataatttctatgcttttatcgttcatgtaaaattcctccgtcgtataacatatttctctctgcatttaatcttaatagaataatttgcagcttattagatctttaaatatagatttattattgtaacatatataatttagtttaatagttaccaaattattttacaatatagaaaatgcattaaaattcatgattactacataaaaagatttgtttataatttatgaaaattttctaacatttacatataaaaataaccggataaataaaattaatcattattaactagttaatttaatagctaataatgattaataaataatattattaaatttagaaattcttggcagtttcctttgctttatctatagcttcttctagtattttatcaacattttctccttgtacatctaatttctcagctgaaatagttgtaatgtcttttattccaaaaaagcctagtatacttcttaaatagataccatcaagctcatatggtgtttcagcatatgagccacctcttgccgcaatatatacagcctttttattttctaaaagtcctacagctccttcttgtgtgtatttaaacgcaattcctactacacttatataatcaacatatgcctttaatatcgccggaacacttaaattccacattggtgctgctatcacatatttatcagcttctgcaaattgatatgcatacttaagtgttggatgatttttactttcctcatttttaggtccaaatactgtatctaaatccttacttcttaagaaatctatatcttctttatacaaatctaatgtaataatttcatcatcaggattatttttttttattcatctataaatacatccgaaattttaaaagttcttgattttccttctggttttgcatttgctttaatatataatactttgttcatgtatctatctcccttactatattattcatatataagtttgcacagcttttttatttctattactaaaaactgatagttttcttttacattgatttctccctatcagttgctagactatatttcagaaaaagtgcttttatattatatgttatttagtttaatgacagacatatattaaaatattatttttcgaattttgattgattaaattattaatatcttttaaagtattctatatacaattattactcttatatacttattctaatagattgaaattcatcataaactaagaaaattattgtcgtttgcaaaattttgttgttataaatcgtattaagtattggagggggtaaaaatcaaatggatgagttggacaataacaaaggttacattcattacttaatagaaacgtattccgatatgctgattcgaatttcgtattcatatatgaaaaatttaagtgatgccgaagacataacccaagaggtttttataaaactacttgaaaaacgaccagattttaagaacggaacacatgagaaatcctggttaattagagttgctataaacttaagtaaagataaattaaagtcttcttattttaaaaatactacatcattagaagatgattttgttgatacaactcaggaggatactgatgtaatccaagcagtacttagcctgccagtaaaatatagaagtatcgtttttttatattattatgagaattatagtatttctgaaatttctaatattttaaacataaaggaatctactgtaggttcacaacttagcagaggacgaaaattgctaaaatctatactaaaggaggattttgaatatgaataaaattaagagctctttttccaaaataaaagcaagtgaagaatttaaagacaagctaaaaatggaattgctaaataatacttcacaattagggaaaaaaacaactgtaaattattatccatttggattaaaagttgctgctgtattattaatatttttaggcactgctagttttaagctaattataaacaatacatataaaccagaaaatatagatgcaggaaatacgacgtatgtctcaaaagatgaagtagataaattcactaatgataattcaatttcttctcctgtttctaacaaaaatgataaccatgctattgataatagtaaatcaaatgtaaaagctgaaaactctgctggtataaaaaatagttcaaattctcatgataattcgccaagtactaacaataagtataacaataataataatagtagtaataataaagttaaatattctaaagagacaccttcaggaaatactaacactaataaaaatatagcatcagtttcacaaaattctgatgataataatttaacaccttcaaacgatataaattcatcacaatatgcaacgacttcaaacactactaatgataattctaacaagaacggggctttgtcccttaattcaaccttgagaagttttagttcgaatgcagtatacattccaaaattccaaataccaaatattcaagaaaaaaccaaatccacaaaaatggttccgttaattatttacaatggaaatgtatatctcaaatcccctatatcgatagattcaaaaagctcaaaaaatattttaggaagaaaaatcggtactacaatgggtgcattaaatgagattaatcctatgaatacctattctaaaaatatcatttctaatataggcactactgatgtatatgctgtaaacggatatgatgaggattttagaataatgactaatgtaactttaagtgatgggacaaattcccccgaaatttatgagtgccttaatggaattacaataactactggcaatgactttttcggaaaacttaatctcccgggaaatatcgtgaatgccagagttcaaattcaaacatttagtaattcgaatagtgaaaaagagaacttttatacagctagtgatcttagttttcttaattcttttgttcgagaactagacaattcaactccatatctaccagaaaatatagagaattctttagatgattataaaaataatgataaatgtaaaaagatatttttggatttaaaagatggtagtaaaaatattccttttacgatattaaggaatggttatatatactatggagaatatcctacaatctactttaaaattagtactaactttataaataaaatttggagtactccctctataattgacgctaattaatctgtgaataaaaaaatagtagggtctgtctgttatattccctactatttttataaaagtcttcttaacataatatatttatcaatattctatttaaataactctattctagtggctttgaattcataaattctttaacaattccatcacaattttcaatattcacaaaaaatattacactataatatatgttattttctttccagatataattaacctgaggcacgataccttcttgtgaacgtttaaatacttgattattttcaattcttaattcttcaactttcttctctacgtttctttcttcattaattttaatatacttatttctcattatttcatcataaactgatgaattcacagactgactaaatgttatcgaaccatttttgtttgaataaagattatttatttcatagcatgttttttctttgttattattcaaatctccaactaacctagcagtggagttagttatacttatatcattactaattctaattggaaatttaggatcaaatccgagagcattttttgcttcttctatatcttctctatcataaatgttcatttctatatttccatcattaagattctttatacaataatttgaatcttttgtgtcctcaggatattttaacgatttcactatattttttatatcatcacttgaaagttctaatgagttattactactcttttcgcttttagactccgatttatattccacactataccataatccatcatctttccatgaaaaataattattaacagcttttatttcacttaattggttttccatagctttttttaccggaaatgtggttgttaaaataacacttaatccgtttatatctcctactttcattggttgcttggagatttccacctgagaattttctaatgccttagatttcccattttctatcacttttaatgattctgaaggatcttgttccgatatttgtaacgaatatattccatctttatttccgtaaactatttctaaaacgttatctttatcagaaatcctttttaattgaagctcttgaactttgtagccatctggaaaaaaatctggaattttaaatctaaagtccgatacctgctccactctttctatgtcattataaaattttataggtgcatcaataataaatttatgttgttccttcatcttatccatgttatttgaacctatttcataaagactattttcttgcgtagctttagcaactataaaatttgtaaaaaatactgctgttattgcaatgcaacttagaataaatcttgttaatttattattatatctatttcccaacaccttccccattgtattcctccttttattcattattgttttccttttagctatgcatattttaaatcattccaatattctaagagtatggaaccagacacttcttaatcgtaaataatttatagaaattatttataaagaaattgagttgtcctttagcttcttatgatataattattgtaataattttacaataattatatcataacttttggtttattaaatttgtttttttaaaacatttttccttattttataaacatttaagctcaattttcacttatttctttatcattattgtctctcagcgtataagtaaatattaagg

SEQ ID NO: 89 - DNA, 24972 bp, Clostridium beijerinckii
gtagtatttttcatgagggcattctccttaagtattattttggttcgcactttaatattactacagaatgacctcattttttatatattttcacttctattttttggttaatcaacacatatgataaattcctatagaataaaaaaaagaatgtagtagatttgttgtacacaaatctagctacatacctgaatattgtggtatatagattctttcataattacaagacaataaaaatctaaatcactatactgtaaatgtataacatttactcctttgtcacgcgcgcaaatgtctcattccactcttcgacctctatccttttatacaaattgtcattcacataaattgctacctcatcataattcgaatcttctatctcttcctcaataaaaaatggcatcactataggaatgcaatactccccttcttcttcaggcttacgccccattttaataaaaagttctgctactcctggatcttttatatgcacaatattgcctggataagtgccaactattttaacttcatcacatggcgttggcatctcacctgtcacaaatatataaattatcccgtctcttctatatgcagtagctttttctaatgctctcatcattgttctatatggacttctatcaaacatatctttctccaaagaatttattaataatttatattatgaatatgactcttaatagttgcttatcatgaatatttcttaataaaataccacaacactcatgaatgttgtggtattaaaaatttggaaattataaatcattttacacgctttttcattagttaatttataaagattaatatgaatatacttacaaagttgttaaaactctaagttaatatcttcacttgaaatcataaactatacttaaactatgaaataccttcaaaccagaaatgagtgatatacttttgtggaatgttttattggtaattttgatggatgtgattctttggctataagttgttccaaatgtgctagttcaaagcttgttctttgaggctagcactttgggttcaactttatagccctagaatcacccattataattacctaaaaactggaacaaaagtatattattcatttcggtgaagtatacacataagtatagattataggtggatatttatatttaaatgttatctaaatcattaaaatatctgctcattttgctcatagctaatttctttgaagctcctgattttcgccactcttcaacctgttccatggcttcattaggattctttcctaagccaacaagtacacctgataatataaattcttgatacaaatgctcagaattgaccccttcttttgattctgttaaggcgcgattaactagtggagcaatataactaacccaatcatctggagtaagatcatttgtgttctctatattttctgtaataactgtatcttgtctcattaagcttctattcatagattcattatttccaatactatttaatgtaaatagataattgtattttgaagcatgctttaattcgtctgtaattatatcaaataatacatccctgtaaactccttcaggaagtcctctcctaatagctctatatctttctactgctgctagctctccaaataaagctttcttaataccttctaaatatgattcagggacttcaaaatttgcttcttcactctccattgtagcatccatatcacctgtaaaatcttcatagatccctctaaacaacatattatgtctgcgctcatcatctctaatagatgatattatttctttctcttcatttgttggcgcttcactaataagataatcataaaacaattcatcttctctttctccttgaattgctttttttaccccctgaattgctatctgtaactgatcatcattgttcatctgataattattactcatttgattattattgttttccataaaatattattgattctcctacaaataattaactcactttcattgtattaatttataattcatttgtgcattaaaatcaataatcccctagctatgccaataatataaattatctcaattcagtatacttatcacccacatttccatgtggtactagcagtcaataaaagttactttaaaaaacaaaatttatatataaacctattttgaaatataattcattttaatattatggtataatttggtttacataacttgtatgttaggagttattatttatgagaaataaaaagaaattttcaatattgcttttttcaattttattaatattagctttaggaacaggatattacttatatcataaacctggaactttgaatagttttttattaaataattataacaaagaaaatattgaacaagtagagattagaagtacactttcgagacaagataaatcaattaaagataaggataaaataaatgaaatcttagctaatgtttccaacataaaattagttcgacattatggtagtacagctaataaaacaaagggtgctattcatatttacatttatgataaaagcaggattactactgatattatcatacatgggaaagaatatattaatattatcaatgactatgataactcaaataaagagtataaaatcattgataatagcttagatttagattatataaatagattaatttcataaaaaaatcagtatctaataatgcagcagctggcgatattactatcggataaaaaatcaggcatacattggtctaagattagtatgcctgatacataagctgctatgctattacaaaattcaaattaactttctgtttctgtaaaatcatctactgggaatattattccacctttatgcctagcaattgtttgaacttcactaactatcaagctatgatctagcattttataacatctttctaaatcattatttttgacagcttctgaaaattcaatgaattcattaaccatacggtgttcataattattttcatttacttctgagctagttccatcattcataagtaattcaaatctcttacaaacattggctggagtgtcttgatatatacaacctttatctccttgaatattatttgctataggtgccttacaatcttttgcaccaacacaaacacatttaaattttccataatctaagattaatacacctgatgtatctattcccctctcaatgtttggataatactcaacattttctggtttgccaaacaaacctactacataatggatgttataaatatttaaatccattaatgctccaccagagaatttaggatcaaaagcaggtaataccttcccctctttaaagctgtcatatctgctagagtattgagaataattacactgaacaatctttatattccctaaagtcggaagtaactcttttatctttttataatttgggaaatattgattagttatagcctcaaataagaataatttctttttcttagctaaatcacttaaaattaatgattccttatatgttgatgtaaatggcttttcaactataacatttttatcagcctctaatgcttttttagcaaattcaaaatgtaaattatttggcacaccaatataaattatatctaaatcactatttagtagttcatcataatcgcaaaaaaccttcttaatcccatacttatcttttaattcattcaatgcctcttcacttcttggagttccgcaaatagcctctaattctatatcttgtaaaagatgactaattgaaagaaaatcctttactatcatcccagctccaacaattcctaatttcatattaattcctcccttttactattgatatctctttagtaaccttatcagtaaatactcaaatatatttaactaaactcaatttctttttagtttttgcttatttactaatatatatttcctctagcataacaattagcctaagctctttatttattcgatatcatagttacttttaatagcattataacctataaatttaatttaatcatcccaaatcaaaccaattaataaaattcaaagttattattcttatcatcatagtatttgaagtaattcctttaacgaatgtatttcatagttaggagatattgatgattcatttactgttccctccttgcaaaaccaacaagtgtcaattccagcgagatttcctcccttaatatctgatgtgatagaatctccaataattaatgtttctgcctcattgaacccttcaacatgatctttgacatagttaaaaaattcaattgctggcttattagcgcctatatcctctgatataaaacagtctttaaagtactgtgaaattccagcgccatttattcttgaatactgtgtcctcgcaattccattagtaacgatatataaagtatacttttcatgcagtttactcaaaacctcatgggcatctggcattaactgcactccttgatttaaatacaatctataggtcttctcccactctccaccatctatactcttcccatactcagacattaacttagagaatcttgtatttaatacttcatctactttaatctttcctagttcaatatcagcccacatgccttgattgatttttttataaacttcatacaattcttctgaatatatttcacccttatctctaattaaactcttaaacgattctccttcgtttgcatcgaaatcaagtaatgtattatcaacatcaaataataacgtattgtatttcatttcatgcctctccctttccttttatggatatacaactctaaaactagatttatgtagtaacttaccaaattataaatattttgttccgaaaagctatgaaaatatcgctgaagcttctaagcagcaggttgtatccactttagcatgctccaactttcataaggaagctcgactcattacattcgctgaggaagttcgagaacccaaaataaaattttggactctcacttcacaagctaaaatgtaacaacctactgctaagaacctttaacagctcattttcaaatgttttcttcatattatgacccttgtggttacaaatatatttatgatttctagtgaagatacaaactttaaatatcagcaactttgtaaatatgttcatctaatttttaagttgtttatctatatggataaacaatatataacttagacttatacaacaattacccgaaagtataaatcaaattttcaatgaggtatctatatagataacccaattataatatataatttggtcaattgaaattactcagtgacgaagtgagtcgactttccttctctatttatatatcttaattatttttaatctttttattaaaatatctattgcgcccataaaaagagtattatctaggcctctactaaattcacactcatcttactaatttcaaatataaaaataatgccaaaaattatcgcaagattattcttgtttgtttatatatatggtaatataatacatttaaatgcaaatacattgcaacaaggagatttatatgaaaacaaaaatagaaataatactagggttcctacagtctggaaaaactaattttataaattctatgattaaaaattgcgatttacaaaatgaaactattgttgtcatccaagatgaatttggacaaagcaaaataaaaaatgaatttataaattcaaatgaaaatatgaatattataaacatcgaaaatacttctaatgaagaaattaatgaaaagtatataaacaaaattttagaaatatattctccccatagaatatttattgaagttaatggtatgaaaaattctaactctataattaatatgttcaataataaaaatttaagaaagttatgcagaattgacgatatcgtaaccttaattgatacgaaaaagttcttcatttatttcagaaatatgaaaagcatgttaagtactcaaatctataatagcaagacaataatattaaacaatataaataatatcaacaaaaaagacttcttaaatattcagaatcaaataaagagaattaatgaaacggctaacttattagagcatgcgccttcattaaatattaaagaaatacatcaagacgaatatagagaaattagtagtcatagtttttctgcaattaaaactatgttttatatgagccttctaatattgtcatttacgtgttttgctgcattatctattactgatagtagtgggtattcattctatttggacaagtttaaaaatttttacactgtattcattagcatattaattcaaggtataccatttatcttagttggaagttttgtatctgcaataatacaaatttgtatcccaaaggatacatttattaaattttttccacgtaatatattcttatcatgtgttattgcagctcttgctggattactctttccaatatgtgattgcggaactattcctgttgttaaaggactcataaagaaaaaagttcctatagctgctagtattactttcatgttatctgccccaatagtaaatccaatagctataatttcaacagtatatgcctttcaaggcatgaaggcagttgtaatttatagagtcgttgcaggcataataatctctattctagttggtttaattatgcattttctaacaaggaaagatgatgatatattaagtattaataataatgcattaagttgcgaatgcggtttttgtaatgatgactatgattattcaagaaataaatttgaaaaaatcagagcagtatttattcatactggcgatgaattttttaatataggaaagtttatgatcattggtacatttttatctagcatttttcaaaatatagtatctgccggtaccaacattccaattttgagtggtaatataccccctctaattgcaatgatattattgtcttttgtactttcagtttgttcaacctcagatgcattcattgctaagggatttttaaaacaattctcagttaactctgtaatgggctttttagttgttggccctatgcttgatataaaaaatacaattatgatttttggaaacttcaaaagaaaatttgcaataaagctaatattttttattgttgtagtatcatttagtattcttattaaccttaggctatagatatccaactttaagactagatttatgttataacttaccgaaatcataaatattttgattccgaaaagctatgaaaatatcgctgaaggctctaagccgcaggttgtatccactttagcatgctccaactttcagtttgacaagctaaaatggaacaacctacagccaagaacctttaacagctcattttcaaatgttttctacacaaatatatttatgatttctagttaatatatgagcttaaagttctagcaattttgtaaatatgttcatctaataagttgaattcttaaatttgatatctatatgtaaccaccaatgaatttatagttctatagattatattaattcagcaacgagaagaattctagtaataatagcatatattcaatagaaggtgtgtacagatcactgacttagattcaatgtactagtaaaaaatgtgtccataatattaacctaagtccaagaatataagaatataagaatataagaatataagaatataagaatatagcaattttagaatatcctcttatcttagtcaatatattttatcttaagatactctttaatttgatatggagatgaaaatatgaaaaaaattaatgcggaagtagttgcaaaaatattaatactattaggtttttcaatattctatttaaaaattattgtaagtaatgaaattctcacatatgtacatccaagaattatcccctttgcaatctttggaatgatttcaatgttcataattaccttatttttgatttcagatgtcttttataataatagaaaaaaatttaaaattaagaatcactttatctttatttttcctttgattatgatactttttatgcaaagtagtagcgcaaattctgccactaaaggcattgatacaaatggaaagcttaacgaatcatcatctactaacagctcttccaataattcaaataacagcttgccttcccttaactcaacatatgaattgtatagtggaaaatccgaaagtgatgggcaaggtcaagtagataagattcagctaaatattgtgaataatattatagaagtaaacattaataactttgtatcttctcttgatgagattttaggaaaccctaaaaaatatgaaggaaaggaaatagaaatttcaggatttgtatatagggataaagatttaaaagaaaatcaatttataattgcacgatttatgatggtgtgttgtgctgctgatcttcaggttgcaggaattgaatgttctagcggtgattcagattcatatgataatggtacttgggtaaaaataaagggtaaaatcaaaattaatacttctgaagatggaatagatccagttatagctgttgagaatatagaaaaagatcctactcctgacacttcttatgtttatccattttaaaatatatgacaatataattttcagtcaacataatctctatgtaaaaaaaatataatgaatataataagaataacctaactttctacgttagattattcttattttatagctctaaaacattgatgtcacatttccagtaaatttatctacataataccatccgccagttgttacgtattctcctgttgtatcatagcaatgaattacataagagttagactcatcatgatcatactcaactttacttggaacatattttccattcgctagaagataatctttcactttctctacagcttcaatcgttgaaatctgagtattagtgttatttatagtaatattagaattaagcagtgttgtaattccttgttttattttatatacatttccattagaagaatcatagtaatattcactaatattgtttccaacttggtcttctgcagagaatttatataaactcttatcacttaatcctatttgattaataaatcccttattctcatatttaatagttccagaatcattataaatattaattatatcatacataacctgaatatcatttggaacaacagtagtagtcttagattcttcccaagctccactatcatttagataataccatttattattatcattaatccatcctgtttccattattccatcactatcaaaataataccagttaccatcaattttatcccatccaactgagtaagcttctcctttagtaaattgccatccttgactgttttgtttccaatatgcattagccatagtagaattagtaatttgtattgacaagatagttaagattactaaggacaactttttcactttattcattgccattcctccctacacatattactattacaccttttaccatgtgatgtcaataatactaatagaatataataactcttaaaaaaggaaaatacacagatatctgtttcacatattatattttcttaacgcttttaaaacttatactcagatttagctttatagataatccaactaagacctgaacttatgcatataactcaccgaaatgaataacatacttttgttccagtttctaggtaattctgatgggtgattctaatgctataaagttgcacccaaagtgctagcctcaaagaacaagcattagtggtgaagcctgcaatttagtgctttcagcgaaattttcatagtcctgtgaaataacaatgtttctcctttcggtggattattacataagtctaagttatatattgtttatctataatttccagagaaaaaagcaaagcactaagaatcttcttagtgctttacttttatttattatagtccttgttcatagctttctatcattctttttaccatttctccaccaacgctaccgttttgtcttgaagaaaggtttcctttatccatgctttcataattgcttaatccaacttctgaagcaacctctgtttttaatctgtttaacccttgttttgcctctggtactaatgttctgtttcttccactattgtttgaagccatatgaatctacctcccttaattttttttattttgtttggcagtaatatcttaaccactatcacaaaatataatctataaaaatgttaacagaagtagtacagatagcttgtattagttaattttagatattcctccttaaactataacctcatatttatttttaataagtgctttcatagcattatctacatctttttccttaacaaggatataatcagtatcataagtggaaattgcaaatatgcttattccgcttttcgctaaaatcgtactaattgatgaaagaattcctactaatgaaaagtccagctgaccttcaacctttaaaattctccattctttttcgcatttaacttcatcaggtatatctttttcaaggcatactattgataattcatcacatgtctttgttatagaaaaaaaatcactgttttttatccattcaggaattgattcgttgttatttaatctgcacactccatatttttcttctaataatctgatagttaatattttttccgacatatctttctttcatcctttcttctcatttttaaacgccttatttatcgcaaatttatagtttaaaatatacaaaaagaaaaaagccaatagaaatattattaaaatacttctcaggcttttatcctttagtaaatacaattaactttaaagtttatcttagaacagctaatcatgttgaactattgaatcaaaaaaacaattcagccttaattattacatgttaaatttattcatctattctaacataatgtaaaatttcaatcaacgtcacatattattgtatatatttcgatcacgatttttcatttataatttcactaaattaggtgtttatttattcctaaaatgtgtagaatacattgcaatctgaatactttcttactcaaaaaaatatattaactttacctctctttagccatctataattttaatatgatatatatattgcaaaaataattcttcatgataattctaaaagtattgcaagaattttagccgtaattgtgaattgtgaaatgtgcattgtgaattgcaacatatataattaattattaggtaatactgaaattggaaatgcatgtttctttattttatatgcaagatctagtttagtatcatcatctatttggctcaatttatagttccatactcttgtattttcatcaacatcttcttctgcattgcaacctataacattccctggtacttcaacttcattaataaattttatatttttaatataactgtatactttttgatcatcagtattattttttattaagttatctattgctgatttattgaattttacatcaattgtgtatacatcatcttttcctcttgctctttttaaatcagtcattgttgctaatccacttgaatttattttttcctctaattctttaatatctttgaactcataggtaatttcttcaatattcatattgtctttaaaatacttattaaaattatatccattttctttagcccattcatgatcaattacatcattttttaattttgttgatataaaatcatcatatacaacttgcaattttacaatacctgacccattttcatttattacagtagaacttcttaaatctatatctctacatccaagtaacataatacctaagattaatataagtgaattaaaaattgttcttttcattttactcattagttctcctcctagatgcatatttttctatactactatagtacccaaagatagattgtatatgcatagctacattacgcttaccctaagtttcatacaaacttaagccatccccctgcctctttattttagggcattctaactaatttcaggctcaaatttctactcacttttaacataaaaatattatccaaattaaattacttttaaaaataataaagggtagttaacgaactaaaatcgcaaactaccctttatagactattttgtatgtaggaacttttcataactctctattttatcctctctgttggtattctttatccaattattatattccaagataactttttctattgttgttacgtttaatttattatttctttttcttttcatttctgcatacatattaattttaattatatttcccatttcattgccctcctttctatataatataactttgatattaattttgtgtgtacaaaaatattaagaaatagttaaaatttaattatatcttttaacgtagataatttttaaaacgctctttgtatagatacagcaactacagcctatacttatgcgtacacccccaccgaaacgaataatatacttttgttccagtttctaggtaattctaatgggcgattctttggctataaagttgcacccaaagtgctagcctcaaagaataagcgttcatagagaaagttctgcttaccaaatgtaaaatttggagcatcacttttcgattctcactttttgaactagcacatttggaatagttcaaaggaaactcgactcacttcgttcactgagtaatttcaattgaccaaatcatagatttggaatttcaattacgaatcacatccatcataattaccaatgaaacattccacaaaagtatattactcatttctagttaagatatatttcatagtataaatctaacttatagttgaattatctatactcaccacttatatcttgttactaatcaagatattatcttttatttacaaattataaatcaagctgttgattggtttatctatccctccctatgctcaaaataccattattgtatctgttcaagctagcttaactttgtagcatgtccattctcatcaaagcgatatccgtatatatctatattggtaattaactcgccagtagaataagttagataatcgtatccacctacattaaaccatccagtaaccatggctccatccgttccaaagtagtaccagttaccatttattttctgccatcctgtcttcattgatccatctctagagtctccaaggtaataccacttattatttttcaataaccatcctgatttcattgatccatcatctgaatttcccaggtaataccaataatctccactcaacttccaatcataaagcatccagccttcactatcaaatagataccactttccatttattttttcccatccatttttagtataacttccatcagtgtgcctataccaccacttattatcctttataatccattgtcctggtttagtaacattgcttattaaagctccatcagtaaatgaatttatgtcacaatcttcacttaccccatttactctgccagtttcagtatattgatgccctaccctattggtaaagaaatttgatggcaaattccaaggatcattgttatagttagcctcccagaaaggcatatcctgtataactgattttgcattggtaaggtaacttataaaacttgtataactgtacatgcctaatggaatagacgttagctggccaaatgcagtaacaaatcttgtaacataatctgcaagtccgctaaagttagtttctacatccatcataggcactagatcccaattataatcttttatcttattataaaaattctgggcttgtgcttctggagtacttgtcccaactaaaaaatgatatgctcccacttttaagttattatttttgcagccactataaaatagttccattttgctatctctaaatgttgccccttctgttgcctttaaataaacatattgaaccccatctcctgcaacagctccaaaatctatatttccattgttatttgatacatctataccttttatataccccataattcatactcccttccgattttcatatttataaagagtaaccctaaagggttactctcaaatattcagttactattgttccattaacttattgcttttatttattttctttagaatctgaagcttggacagtttttgcttcatcatttgtagtttggtcgcttaaacctggtgtactagtatcaactataattcctagcattgttaagattgttaaaatagtattaacaatttctgtatagttattaggaattatatttaaccctaattgttgcactaataatgctatagcactagctattgcaacccaaaaggctttgttttttaatcttgcttgaagatcaatacctaacatacctatcttcacctctcttcttttatatatacataatatgaattaaaactcttaatggcgacttaaaattgaactaacagtacgaattctattttataagtggtactatcattcatcactttaatacctcttaaaatatatatgtttaaaaatatattatgaatgccatttttacaatccatctaagttttaatctaagtaataccttattatattaaagttatttatttaaagaagaggcaatgtaatataaatctcaaataaaaatagagataatattttactaagcacagaaatattatccctactttcaactaaactaattttattgtgatttattttataatatacactcaatgctcgttatctttgcatttcccgtaagcggcttataaatcatcactttcgaaataccttgtccattatgcgctgcaacctttgacttacatataaaacaataatttgttccatttacgctctgagtagctaagattttaggttcatactcaacaccaattaattcacttaatgctgtcttaagcacatttatatcatcatctgttatgttattgtgaactttccatcctcttgatatcttcatagaattctcctctcatttatatccccttaaattttagaaaacgattatataacattcgatttactatagcatattcatattatctgaattttttaactaatttccaaaagaaaatttagaagtgcagcaaatttgctttaaaaaataaaatatagaaaatcaattgtaatatgcattggtgattatagatatccgacttcaaatctagatttatgtggtgatagaaccaaataataaagagaagagtcccaaacattatgaaacacttctctttaactattctatttaattaataacaaactttctaacgctgtaaatttacttttctcataacatctttcatagtttgagctccatatttattaataagatctttaactattgctctatgaaattcctttatagttttttccttcaattcattatcacaaatagaattgtaatcaatttgattattcatatttttctctccttttgacttatattcataatgtgcataataaataatattttatacatactttatttaaaaatatctaatgaagactatgaaatacactttgaagttaaaagtagggctttaatagctattgtatataagaatctcttttctaaaatataaactgctttcaaagcatacctttttttcatttctcctgtgcatgcgcttactaaatgttagttttgcgatatagtaatagtctgagataccgtaataggtctcattcctgtttgagatttagtttctttatttaattgctggtcagagagccattccataagcgttgttacttttccatttattattgatgaacattggttattatatacgtatatccatgaccagtgcccattatattcatatggtgtgttatctgccttcttgtataaacctgtagtatcaattacattatcaaaaaatgaaaaatgaacatttgtatcaccggcttgcactaaacgatcataagttgggactacataatcagctggaggtactgttgtatctgttttagctgctgtaaaccaaattggcactttcttaaacgcttcaatatctttatcagtaatcaatgtatcctttagcgcctcacaagttgggaaggctgctgcaaaataatcagcataatcacgtatcataagcattgtcatatagccaccattagaatctccgcctatataaattctatttgtgtcaatattactattctttgatacgtaatctttgattaatgacataagagctttttcatactttgagcttccatctccaaaaccattaaatccatccatccaaaaagtttgtgcctgaggaactaaaatatatgcaccgttaaaatatacttgtatgtcttttgatgcaaaatttacagctttattccctgatataggtaaaagtccatctgtccctccttcaccaataccatgtaaccaaataattaatggttttttactataatcattttctggtgtatagcttacatattttatagtaatgttatcataagttgcacttccgattttgaaatcatcaacaagctttttagttccacccgcaaatttatttataactaagccagaaattttgcccgaatccgtaacgatatcattattttgtttaattgtaaaatcacaattaacccatccattaagattcgtagttaaatcatagttaattggcgaagttaaagatacatcaggtccaacttccaattcaagtgttacatatttccctttaaattggacatttccatcattatcagaaacataagcttttatgattttacactctccttctgcctcccctaaaatcggactctctatcctattttcagttcttactacacgtatcttaaaagtttcgttggttattgaatcctttgatactgttgcacctaaataaatgattatttttgtaattgctggaccccaatcaaatgtttctgtaacggttctataagattcttcatttatttgcttacttgtagcggaaacatcaacagtagaagaagtagacatattagctccgatagtacataatattatagtttttaaatatttcctaatcatatttttcattgttttcctcctatatttagaatatagattataagactttcctatcctcaatcactatgaattatatattagaatataaaaaccccaattaatcaaaagagactaggtaatatctcttctcattaattaaggtttcgcctgatctagtaagtaacaataacaatatcttgtaatcgtttcttcacatgtttatattagcttctttgctattaaatgtcaataattttgttattatttttatccaaaaaaatgatagacaactgtgaagctgacgattttttaacctcattctttttaagtacacgtaaaaaaatctcacaaaagaataaaaaagctggtagaacaaataatttaatattaaatgctctaccagccttacttaaccgcaaattgagatttacagttttttaaagaaaactttttctacgttcttagttcttaattactttaaaccttgttcgtaactttcgatcatgtgtttaaccatgtatccaccaacgcttccgttttgtcttgaagaaaggtttcctttatcttgattttcatagtcttgtaatccaatttctgaagcaacctcagtttttaatctgtttaacccttgttttgcttctggtattaatgttctgtttcttccactattgtttgaagacatatatatctacctcccttaaattaatataaattttgcttggcagtaatatattaaccattatgatgaattataacctataaaaatattaacaaaagtagcatcataaattataattagaaaaaactttcaatatcttgtactaaaattcataaaaaaagtagcaatctatgattactacttttttatgtattataaattatacagccttgtctgaattttcttgattgctttcattttgaagtgcactatgctttcttccgtaaacaaaatacactattaaacctatagcaagccatactaaaaatccaatccaagttattaattttaatccgcataataaaattatacagcatattattgatattaatggagtaaatggtactcctggagttttaaacattcttttgaaatctggcatagtttttctaagtactataacggcaacagatacagaaatgaaacttaataatgttcctgtacttaaaaattctactataatatctaatggtaagaatcctgctattactgctgctatacttccagttattatagttgaaatgtgtggagttttatgtgttggatgcacttttgaaaataattttggtaaaagtccatctcttgacataaccatgaatactctaacttggccataaagtacaaccatcatagtagaaaccattccaagtatagccccagttccaactaacgctgctccccaatttataccaactctagctaaagctcctggtactgcattttctgaaattatttcattataaggtaccattccagtaagcacaactgcaactgaaacataaagcaaagtaactgctattaaacaaattataagtccaagtggaatgtcttttttaggattttcagcttcttctgccgctgtagatattgcatcaaatcctataaacgagaagaatatagtagctgttgctgcaaaaatccccttaaatccaaatggtacaaaaggttgatagttagatggatttatatgtgatactccaagaactataaatacaataattatagttatctttattcctacaattaaattgttaactctagcgctttccttcataccgtaatataatatgtaagttattattgcaattattaatacagctggtaaatccactattccacctttacttggtgacgttatcaaagcttgtggaagtgttacacccactgattttaatattccaataaaggttcctgaccaacctgatgcaaccgcactacatgcaactaaatattctgcagtaaggcaccatccaattatcatagctactatttcaccaaatactatgtatgaataagaatatgtacttcccgcaactggaaacatagttgaaagttcacaataacacaatgcacaaaggccagctactatacctgctaaaataaatgaaataattacagctggtccagctaaatgtgctcctgtccctgtggcaacaaaaatacctacccctactactgctccaataccaaaggcagctatgtcttttgctttaagatttttctttaaagctgacttttgcgcgccttctagcattttatctaacgattttttcttaaaaatattcatataggtcctcctatttacttaatccattcgtcaaaaatctcttaataactatatacctctatataacatattaaatatttatctagaaattttaaaagtacaacaaatcaattaatatattatcatatttttataatattaggcaagacattaacacattaataatttatatattttttaatttttctcttaaaaaaccaatactttttaacataatattatgcaaagtcctaatataaggaagaaaatcataggttaacgacgaaaacccaacaaaaaattactgcattatttttaatctatgtttctaaataaatttaaacctataatatccatcattattttaaacaaatataagaataatattagtaataaatgaagaaatttattaaaaaatgccgaacttatatctcttatcattactttaaaacgataagaggcataagctcggcactttataataagattattgtaaaattttattgagctataagataagccatcaattcttctcttgtaaatcttttaggttctttaaattgatttaaagttaacgctctataataaacttcggctactttttcaacatatcttcctttagataatacatcttctatatctttactaacaacaattactccgttactttctaataaacaagcatcacttgtgctcaatctttctactaagtcttttgctggatcattagtttttgctttttcataattagctaaatatatataacctccgtagtttgccgcatcataagttactggaggaattactttattagctaccgcaaaagtagtcgcataaactgggtgaatatgcataaaagcttttatatcttttcgagccttatatatatcaagatgcatttgcatatcactatttggctcaattccatccattgtttcaactttatttccatttaaatctacaacacaaacatgttctttacataaatcctctattttaatttttgatggtgttataattacataaccagaactttcgtctttaatactaaaacttcctattttttctatgcataagttatatttttctgcgtctttagcaatttttataagtttgatttttaagttttctaacatacttacactctccttcaccataacactcacttaatttaatcccattactttatcttcaaatattctagcatccattaatttaagatctttatctactattggtgcaaaatccattgcagctaatatatctttttcaagatttactccaggtgcaatttcagttaaatgtaatccatcttcttttaactcaaatacagctctttctgttatatacataacaggttgctttaacttcgttgcacgatttccactaaaagtaatctgctgaacagagtctacaaattttttatttgatccatcatttataatttttaatttcccatcttctatttttatgtctaatcctttagctgtaaaagttccacagaagactactttcttcgagctttgagtaatgttaataaatccaccacagcctggcacctttggtccaaatttacttacatttatatttccctgcttgtctacttctgcaagacctaagaatgctatatccaatccgcctccatcgtagaaatcaaattgtgttggttgatcatacatacattctgggtttattgatgctccaaatttattaccgccttgaggaattccccctatagctcctggttctacagttaacgtaaagtaatcacatattccttcttcattagcaacatttgaaattgcttctggcattccaatcccgatattcacaacttgtccttttactaattccattgcagctcttcttccgataatttttctttcatctaattttaaaggtgctaatccatcgaccaccatatttgcctctccagttaatgaagggtcataattgtatcctaatatttgagcttgatcttctttatcttctgcttcaactatatagtcaacatatattctaggtatcttcacagctcttggatccaatgttccaaatttaacaatcttctcaacctgaactactacagttcctccgcaatttttaactgcttgagctatacatgcagcctcagaataagtagcttcatggtccattgtaatatttcctttttcatctgcatatgttcctctaataaaagcaatatctatctttggacatttatatattaaattttcttcacctaatatatctattacttgtactatatcatccttagttattgaatttgcttttcctccctctactctaggatctacaaaagtgtttagtccaactttagttatagtgccagtcctattacttgctttatctctaaacatatgacacataactccttgcggtaaattatatgcatatgttttattatctctaattaatgcgcctatcttaggtgctaagccaaaatgtcctcctataactctacctgttagcccttcatgtgctaagtgatttaatcctttacttcctctatcacctgatgctgctgcaaacattaatgttagatttttggggctattttcttctaaaaatctttcttccaatcttttgattaatgattctggaactcctagtaatgcgaaacctgatgttgctaaaacattattgtcttttaccaaatctgctgcttctttagaattaattatttttaccataaatatcatctcctgaaaaatataatagcctttgttatttttttatcaattcctcttacctttattttaatagcttgtctattttttgtcaatctaattttctgacaattcagaattattttttaatccattattattcaaaaatctattttttattgttaatgtattgatatcgctaacatttctatatttctcccacatttttcaaaaaaatttaaaatataaaattaaatcaaaatatttattatctgattatacttacattttatgaaagcaatcacatattggttaatatatattgatatttttttaactatttttcgatttattattgattaccaaataacaacattatatttcacatatcgctttaacatatatgttgcaattcaaaatgcataattacgtctaaaattcttgcaatatatgttctccaataaaaccatttaacatttaaattttccctctttaatacagcaataactcctctgattgtcttaaaatcaaaggagttactactatattataaaatataaaacttatattgttttctcttttgttatattctgacttataatcagcaatatatgttatatattaagttgctctattattcatattttctctatatggctctaaatgaacaattacatcggcattattattaaattcctttcttaacgcatcttgaatttcatgagttaatttatgcgactcttcaagactcattcttgaatctgctaaaacatgcatatctatatgcatatcttcaatagttccacgacttcttattttatgaacaccttttacacttttctgggacattgtaatttcttttattgtcccagcttctactgcaatactatcaactaaaatatcgctagcagctctgaatatttcataggcagaatgaaatataaagatagcaactacaacagaagcaaaactatctataagtggcgatactcccaattttattgcgctaacagctataattacaccgatggttacaaatacatcactttttgtatgcattgaatcagaaattagaattgtactctttaactctagtcccctcttatattcatactttgtaataaatatattaatgcatagtgtaacaagcattacaattagactgatcgttgtaatttctggtctaactggatgcataaatttattaatcccatcgattataatctttccacctataaaaactaacattccaacaataaataatcctgtaagtgtttcatatttcttatgtccataaggatgctcttcgtcaataggcttggctgctattcctaccccaataagtccaataatattagatgatccatctgttattgaatgaaatccatccgccactatactcgaactatttgccaaagtaccaattactatttttataaaagctattattatatttgcaaacataataatccaaagcactctttttatttctttaaaattgtttttctccaaaattacacctacttttaattaataaaatttaagtaaccataataaattggttgatgaattcaactatagataactaatatattattattttttcgttatgttacttctaaaaaagtttattctacatcctacttcatcaattattttaataatagtttgctcattaattatcaattggtaatatattttatacttctatagtatgttattgttttatatatgttaatatatctaaaaatatatcaagtacttattattatcagttgaaaataaattctaattgatatctcatatattccacgatctattagctcaaatattatataaaaagaaatacagacaacaaaaaggactcagaagcccatcttccgaatcctccattttaaattaatatattgcaaaaataatccttcatcataattctaaaaaatattacaagaattttaacgcaattgtgaaatgtgcattgtgaattttaacatatatataccaattatcgaaaatctttatttccaatacatctaattattcacattcatgccagcttgtacaaaaatataagattactttaaaaagctattgcaaatagtatattggtattaattgaaaaaagcattttgttaagcattctatagaattatatttatataattagctatctcttttatactttgtgtggtaattcacttctaattttttctaggtgctttggataatcctgaattacaatatcagcttttattccaatcttctctaatgcccccaatgaagattgtactttatcccagaattcttctactgctctattgacatgatttttcaccactgcagtctcaaactcattattttccttttcaacttttctcaactgattcattaaagttatttcatcagaatctacattttttaattctacacataatgtattttttaatccaagtatacaaagatcatcacttaatccatcttcgcctttattagaaacatatgaaatttctttaataatttttcttcccgtatatccgattgagtcttcatattcttcaaatacaagaatgtctctaacactaaactccctattgtattctactaattcaaaagttttacttccatctcttatcactttatagttattaggcgttatttttagctcatgtatcatttaaatcatcttctttctatagtgtattatattttaaaattttagacttaaataaattgagtatttgctctatataactattgtgtcaaaaaatacttctactattcttaataaaagcttttaaattatgtaatctccaattaatatataaataatccactgaaagtagaaacattgttatttcgcaggactatgaaaatttcgctgaaagtactaaattgtaggttgttccattttagcttgtcaaactgaaagttggagcatgctaaagtggatacaatctgctgcttagaaccttcagagatattttcatagcttttcggaatcaaaatatttatgatttggtaagtagactagggaatcacttccctaacccctctcagaaccgtacgtgcggatttcccgcatacggctccccacattataatt

SEQ ID NO: 90 - DNA, 24809 bp, Clostridium beijerinckii
ataataatgtaagataatttcttattaaatatttgtccttctacttattaaaaaaatataataatcttttaaaggataacttggctagtaaaacaagttatccttttccatttaactaaattatataaatctatttaatttatatttttatcctgtaatattatcgtaaaaaattatcattatttgtaatacgattttctttgattagtttcctcttatgttataaaatgtaaaagtcgggttaaatcaaattaaataaaaagaggtattattatgaacaattttaaattatttcaattaaaatatagaatattcctaagaaaatctattttaaataagttgttaagttttttctccccaagtaataaatttatgattatactatcacaaaatttggacaaacatattgttgcatattataaaaataaggaaattcatgaagtacataattcaaaacaactttattcagtttcgaagtctttctaaaggacttgtaatttactgaatacttttaaagttaagcttgacttcatacctaagtaactatacgctttttatctgagttagacgcaattctccagcaactcaaaaaaatactgaagaaattacaatatcgctctttagagcctcgacgtgtatacgaatcacgtaccgttgcaaacataatttacatagaaaactctatgtatagtctttttatatgcgtcaactccctactacatatcatatctttcaatattttgactacctccgattaagttaccctgaaccgctctaatgccatatccttatgaaggacttaggctataacatggtaataatctatctatttttttagttttttaaagtctcaataatcttttttaatctttcaattcatatatgtctaatgtaattattatttcattaaatccattagttgttttattatgattaatgtttatttgcatatcaacacctactttcttaacttaatatttttccctttagaattttccaacttaatagattccaaaggattttgtgcaatattttcgtaattcaaatcttctgttaacatctcaatgtagcgctttaaaatctctaaatgtcccaatagatgttataatccaactatattaacaccgtttaatactgatttttttgcccaccagtgcctaaaggcgtgaattgatgtacgttcattcccttgcttttgttgtagtcttctatggctcttgtaagtcctctctctttcatttttcaccttgaactgttgagaataaataagtacaatctactggcaaatattcaatatattttctattcatttttatcataaaaaaatagtaccccttcctaaagccgtgggtactaaaatcatgtataaaaaatacccacacccattaataattaaattaatatagtgtgagtatttatattagctaattaattcactcttaaaccagtaaaaccttgattttcagactatttagctaatgcttcttgaacagcaacagctacagcaacagtcataccaaccattgggttgtttcctgctccgattaatcccatcatttcaacgtgagctggaactgatgaagatcctgcgaattgtgcatctgagtgcattcttcccatagtatcagtcataccataagaagctggacctgcagccatgttatctgggtgaagagttcttcctgtaccaccacctgatgctactgagaagtatttcttaccttgttcgatacattctttcttgtatgttcctgcaactggatgttggaatcttgttgggttagttgagttaccagtgattgatacgtcaactccttctttatgcatgattgcaacaccttctctaacgtcgtcagcaccgtaacatcttacttttgctctttctccgtttgagtatgctttttctttaactactttaacttctccagtgtagtagtcaaattgagtttgaacatatgtgaaaccattgattcttgaaatgatgaatgcagcatcttttccaagaccgtttaagataactcttaacggttcttttcttactctgttagctttttcagctattttaatagcaccttcagcagcagcaaagctttcgtgtcctgctaagaatgcgaaacatttagtttcttctcttaaaagcatagctcctaagtttccatgtcctaaaccaacttttctgtcgtctgcaacagaacctgggatacagaatgcttgtaatccttctccgattgcttcagcagcatcagcagccttagtgcaacccttctttattgctatagcagcacctaaaacgtatgcccatccagcgttttcgaatgcgattggttgagtttccttaacgattgtatatggatctactccaacttcagcacaaactgctttagcatcttccatagttttcattccgtatttttctaatactggagtgatttggttaattcttctttcataactttcaaataatgccattttaaaaatcctcctttacaaataattatttatgtcttgggtctaataattcagcagcgtcagcaactcttccgtattgacctttagctttttctaatgcttcgttagcatccatgcctttagcaatgctttccatcatttttcctaagttaacaaacttatatccgatgatttctttatcttcgtctacagcaacttcagtaacataaccttcagccatttctaagtatcttggtcctttagctaaagttccgtacatagtaccaacttgagatcttaaaccttttcctaaatcttcaagtcctgctccgataggtagtccaccttctgagaatgcagtttgagttcttccataaacgatttgtaagaataattctctcatagctgtgtttatagcgtcacaaactaagtctgtgtttaatgcttctaatatagtctttcctggtaatatttctgaagccatagcagctgaatgagtcattcctgaacatccaattgtttcaactaacgcttcttggattataccatccttaacgtttaatgttaatttacaagctccttgttgtggtgcacaccaacctattccgtgagttaatcctgatatatcagttacttctttagattgaacccatcttccttctacaggaattggcgctgatccgtgattaggacctttagcaagtacacacatttcttcaacttcttttgaatacatcatatatttttgctcctccctaattaatagataattacaaattattaaatcttatttctaagtttaaaattgtagttgggcataaaataacccagtggggcacttttccctattcctattctagcaaatgatttgattccccacaacctttatttaaaaatttatgcacatttatctacttttatttgaaaatccgaactacaaatgaataaaaatcttatattaactttaattagataaaattttgtctaatactttcattatgtatttttatatggatattataaattaattttccaaaaataaaaataaattaaaaatacctattgaaatattctttaagacatggtagaataatttttgtcagtttacatgccgctgtgatggaattggcagacgtggtggactcaaaatcctctggtagtgatatcgtgccggttcgaatccggccagcggcaccatttgttttggtggattgctgtattacttggcttagatgccttgtagtacagcttttttatacgtttctcacttcttttcccatttctgcacaaaatcctacatttaccagtaattaatcctctaaaccctgtaatcatggcatttatagcgttttgtaatattctagttataaatccatcttaccttaatattttccttttgggcattaaataatattggctataattgcaattgtatttgccactaattgttaaagtatattgataataattttattaatatatttcttatgacataaaattgaatattttttaattactatttgcataaagtttactattatttctgataaaaataataaagaaaggtaaaaagatatatgaaaatagagtcactattcccaaaactagaactagtataagagaagtacctcttccagatatgcttaaacctataataaaatctctcataaaaaaagaatatggagaataaactaaaattcggtgaattatatttgaacaataatctaatcttctgcaaagaaaatggtgattatatagataataagaaaacaaatagacatttaaaaattgcataaaaaaaagctggaattaaaacagatatacattaccataatttaagacatatctttataaccaaccgcctaagtaaagacattaatccacgtactgttatgggttgggttggccatactgatattaaaatgcctatgcttgtttatgctgaaattaataaagataagaataagaaggaatatgcgaaaattaattgtatgtttgattaaagctaggccaatggcctagcttatttaaatttaatagagttttatatcaatcttaaaattacatcctatctattctttcatcttgttatttattttagcccaatgtttttttacttgattgtgaatttcattttttaaaatattactttcgttaaatatttcttccgatcgtcttgcatatgtaataaaatttccatattctttactatacttataatcacctaaatgagtataaagtttatataattttctttttaaagtaaattcgtatttactgccgttatatttcttaacagttcttgctttcttataagctctacaataatatttaaataagcttttctctcttattttcactacttgtccatcaaaactaaaccctagataatttaaaatatttttattagtatttagattaataagcttatcatttccctgactatcatatataaattgctctgttttacttggatttaaatctaatcttggtatacttttagcaattctatttatctcattaatgtattcattgtattttttacttataatctctgaatcttgaattggaataactataattaaatcatcacaataccttctatacaagcctcttttacttgttacataatcattaacttgcttatcaaaatctagcatataaacattagaataaattgaacttatagcagacccttgcggtattccataactattttcattcttttttagatataattttttaaattttctaaattcttcagttgtaaaatatttaggttcttttagcatttcttttatctttttatttttgtctttttcaatatcatcacgttctatatatgtatattgtgttatatttttataaatacaaaaatgctctattggtaatctttcaacatccaatgcttgtaccaatttatccttaagatagtcatggtctaagttatcaaaaaaaaccgaaaaatcaccaacaaatataaatgcactcttgcatttacatataaattctaacgcttcctttgaaaaatgtatattgcatctgcccttaagattatttctatatgcagtggctactttattaatacctctattaatagaaattttgtcatagcattcgttaagtatttgtccataatattggtaaataaatctatcaatatgtgatgaataaaaaatatctcgtttcttttctcgtttttcctttattccagtatctttatcataaacatatttgttaaatataatttcataatgtataaacggataaaatccatgtttttgtatccagttagtatttttaatcatattttcatatttaacataatcttttttaatatccaaatgagtataatacttgtttttaaaaacaacatttctattcatccttttacctccaaaagagcttattagccatacgaccggtagatatcaaaagctaataagcattttagaaacttatcaatacgtatattagatttctccatatatgtattaatctctaccatccctccacgatacttattggtatatgattatattattaatagctctacaggcatattaatcggaggtagtgaaatgcacaagttagttcttatactgttctcacttattatcttattcttattcaaattacatcttgacaaagaataccaaatccccctataacagcaaaacattactttatagggcacttttattatattacaaattaccatttatttcaacaatctatactttaatattaactgttttctttcatttttgattataacaaaaaaagcctagtacaaaaaactaagcttcttttgaaacatttttagtgttaaatttatcattatcattcaatttacattaactttattttaatcatctattttattaaaatatctctactccattcaggtataatatttcttatccatttaattttcccaccacatatataagctacatccttaaatctgtttgtattatcatatatatttacttcattgcatacattcaatacttctttcaaattttctaatgactcataatatcttctctctatagcttcatctggaattccatgtccaccttttaataccctaattctaactctttctttagcaatattaggattattaactccaatataatttataactacatagaaacctctttgccttgctctttctatatttttaataatacttttgcctgcaagagtagtttcttgattaaatgatatatcattttttatatagtagtttatgagctttaccgcttcccttgcacatttgatttgaagattattatctttccatgaacctattcttgctaccatctcatctgtatttattcttttttcattcttatttctttcatagtaaatagattcatatatcgatgtttttcctgctccatttactcctgcaaatatagtataagtagccattaatttttacctattactctttcttgttccttttgcagcactatctcagataaagcaatataaaaatcttgttcttcttttgttttagctcttttaaacaattcctttaaatctgcatatgaatattttaaaaattgatcatataaattatttttttcatttatcttttccatagaacttcctccgataaataatacttttattatattatatcctaaccaattatcaatataaacacttttatctattgaatttacaaggttgctctataattacttctattattctatatatttttactattatatttttctagagaattcatctttgatttgtcattttctgataaagtttaattgtctcattcatatcttcatcttgaccaccatcttggcctttatcttgaccactaagataatattgcttcttgattcaatatcttattattttataataaatctaattttattttccaaatttctttcaagcattgatatcacttaactagcagctataatttttccactatttttcccactacggcacaaaaaaccactaaaagccgaaactacttgtctatatataaaatggcgtaaccatgggctttttaagcattactgtatattagtgtacatactccccttatgttttatcaaaagagtctgttgtattttaataacccctaacattattttaaaatctttctactccgctcaggaattatatctctttttcatttaatcatttcatcacatatataagtacatgcttaaatttatttgtatcatatatatttatttcattacaaatatcaaatatctctttcaaattccctaatcactcataatatcttctttctatagcttcagctgtaattccgtatctaccttttaatactctagttccaactctttatctgcaatttcatgactatcaactcacaatatcacaatcatctttaatgtttacaatcactctaaaatttatcagatacctccccagtaactcttccactttttcaaatagaaaaatataaagtaacatctgtatactgcttcttaagcgaaaccttatctacttctattatagatacatgactccttctctagaataacattaaaatcaattccatttttcatactagaatcctttcaacccgcattttataagcatattctgaagaatatatattctaatatggtaatattctttagaatttaaaacaatcagaaacgtaatcaataattataaatgacctatataataaatacttttaaactataaataatgaacctatagataacccaactaagacctgaacttatgcatataactcgtcgaaatgaataatatgcttttattccagtttctagttgggatatatttcatagtataaatctaacttataattggcttatctataataatagttgaactttcaacaaacatattatatgatagttaaagttcacatatcatatggataaaatttctaccacaaaagcgactcaaaagttgaaaacagaagaatacaccaagtaagagacagatatacatgataaacaagttactcgtctttatacatttgaaagaagtcttaaatcatataatcatatttataaagaaatattatgaaattatttttatttagaaaggacgtaatctttttgaagaattcacataaaattatacattacctttttttattttttggagttttagctatttctacatctgctatatttgtaaaactatcaactgcgcctgctccaatcattgctacatatagattagttttttcaacattgatgatattgcctgtaatactatttaacaaaaaatacttattagaaataaaaaaattgaagctcaaacaattagcggcagtgttttcatcaggaatttttctagcaatacattatatactttggtttgaatccttgcgttttacttcagttgcaagttcaactgttcttgtaactatgcagccactatttgcttttataggaagctattttttctttggtgagagattaaagaaactatcactatttggtggttttttatctatattcggaagctgtataatcggatttggagattttaaaattggtgggatagccttgataggagatatacttgctttactagcagctggagttattacagcatatttcctcatcggacaaagtgtaagaaaaaatttatctctagttgcttatgttttcatttgttatttaagcagtagtatatttttattagcatattctgtcatattaaaatatcccctaataggctatgcaaactctgattggttatggttcttctgcttagcattaatttcaacaatacttggtcaaacagttttaaattggctaattaagtggttaagtgcttcaactatttccatgagtatattaggtgagcctgttggaacgtgtacattagcattcttaatactcggagaatccatatcttataatcaaattatcggatcactaattatcttaatagggatatgtatatttttaattggccaaacggtaaaagtaaaagatgatagttcaagtaattcaaaagctatataagtatttaacaaaaaaattcttatcctacttatgctctgtcatttcattatttaaatacatttaatctttttagaatttcaatatactttaatgcaacatgaatatagtaatctttttattaattttatattatttattaatacaattatattgttaatttattttctaaatttataatcatttataattaatgtagaaatagtcttgaaacaaatcatatttcaagactattatttattcctataagttatacttccttgatcaattagaacaaaatcacaaacgcctttgtagtttgagattttgttacacagtttaaaagtccactgtaagtaaatgatatataaccaccaatatatttctatatctctaaatttagaaatagtctgaaaaataaggcttctctactggtattaactgttctaaaattttgagcatataatattctgtttttattcttccacactcatataggaatgtaggacgcttatatcccataagcatagttgttaatgtctgaatatccatttctactaaattagcagcatacatatcatcactcttctcacagactgtttcttcatcatcccaatagatattaaaaatgccattattccattgagcaataggatcatttattttgaagcttatcttaagtttctgtgcttttactaggaatgggtattttattataaattcttttacatttataatccttgccataaaatatggtttaatagtttcaactatttcgctatcttcaaataaaaaggccattggctctcccgagaaattatttcccttcacttcattaaccatagaataatgggcacttatataattccaaattccgtggtgtgcttcagtatttaaataaaccatttctttaatataaaatatatcatttctaatataatagattaaataaccaaggggcttatgattcttactgtagtaaatagccgcaataatatcatcactatcccaacgccaatattcatcccacgcaagctcatctctaatcattgcaccatgtctctgcattgaaaaataatcatgtacatttaaaagatcctcacattctaaatctacacgctccatcattccttctactgctctttttttaggaagctgcgaatctttgattgtaaaagttattttatcagaaattatttcccaaccatgctttctataaagagggattgaatatggatataaacaagaaataacttgaccttcttcattcatatgaataatagctcgcttaatcaaagaatgaattaacccttttccagtgtattcaggataggtagcaactccagtaaccccacccattttgcaaatactatcatggatatttactttcatggaatatactacaatcattgaagctaacttaccgtgataaaaccaaccaagaacataggcatttttaagaatcggcattttagcatgcataatttgctcttctgtccaaccagtatgcaaaagatcttccatcgttatttgaaatgcataacgtaaaagcccattaaactgttctagatcatcctcagttaattttctcattttaaaatcgccgtattcttcaataaacatttctttatctttcataaatcctccccatattcatcaaaaacgtattaaatataattcattttacgtttattgttaataacctaaatatttattagtataattttacaagaccatataattaattatcctttattattatcttatattatactataaatctttgtgcgatacatgctaaactttacaatttattcctctttgttttaagtatataaactccttttttcactatttgcataaaaaactaacccactctttccttgtacattcaataaaatcagacatatttatttattatatttggtaattaaaattaatatatttcacatatatgctgcaacaataaattcacatttaaaatttaagttatgtgagctaagttaagactcaaatttaaaaattcaattgtatcatatataatatcccaaaatttttcacaaacttttataacactatataaacagcttttattttccctatcactgattaagaataaattaaggtgattcaaggttaatattaagagaaacatggtaaaatatatttgtcatttatttgcaaggaggtaaagtatgataataaaaaaacagccctacaacatctctaagattgtactagcatctatatttttaaacttaatacaaataatctttataactctatttatctactacaaaagtcaaaatccacatatgattgaaggaaattttatcatttatgtcgtagctataagcataggtattaatagtattattacaggaataatattttataattttttatttaagaaaggcagtaataatttaatagatactataagataccttgaggacttcaataaaacattaagatctcaacgtcacgactacttgaatcacattcaggtgatttactcattaatggaacttgaagaatttcaggaagcaagaaactatatagaaccggtctataaagatatagtgagaattagcaaagctctaaaaacttcaaagccagcagttaatgcattgtttcaggcaaaattacaagtggccgaaaagaacaatatcgatatggaacttgaaataaaaagcaacttaaataatcttaatatggaaccatgggatttttgcagaattattggcaatattatagataatgctatatttgctttaaaacaaaaaccaagcaatagatatatgcttgttgaattatcagaagatctaaaaaatatacgactcaatatatccaataacggagattgcatacctcctgaaattatagtcaacatatttaaagaaggattctcaacaaaaaatgagaaaggtgatggcatgggcctcgctatagttaaagaaattgttgaatgtttttctggtacgattgaagttacatcaaatgataaacgaacatctttcgaagttattctaccaaaaaaagaataataaaatcttataaattgatattcaaagatgccaacactcttataaatgacatttgaacctaaaaactgtataacttagaagctttatgttaccaaacttcaacatgtggcttattatatttatataccaaggagggaggtacaaaaatatgatcgcatttttacctgatgtaacagttcttacagttttacttctagtagtagggtttggattagtgcttttagaaatgcatattccaggttttggggtgccaggaattgccggagctatatgtttaatacttgcagtggcattgactgctgagaattttgcacaagctttagttatgatattaggaattttagcaatcctcggaatcatgttaggtgttgttctaacttttttcacgaaaggaaagttctttaaaccattaattcttcctgatgagcaaaagaaagaacatgggtatattagttcttcagatttagattatttgttaggaaaatctggagtagctgttactgatctaaggccaactggttctgtagatatagacggagttaaatttgatgtaatttctgaaggagaatacattaataaagggactaatgtagaaatatttaaagttagcggagttaagttgctagtaaaaaaagttaaaatataaatttatatttaaaggagagattattaatgattaccaatttaattatagtagtaatagcagttgtatttttaattactgtgtttgttagatttataccaataggattatggatatcatctttagcagcaaatgttcaagtaagcatattcaacttgattggtatgagacttagaagagttgtaccttctaaaattgtaattccacttattaaatcaacaaaagctggtatgggacttaatgtcaatcaattagaagcccattatttagctggtggtaatgtagataatgtagttaatgcattaattgcagctcatagagctgacatagacttacaatttgaaaaagctgctgctattgacttagctggtagagacgtcttagaagcagttaagatgagtgttaaccctagagttattgaaactccaaatgtttcagcagttgcaaaagatggtatagaacttttagttaaggctagagttacagttagagctaatctcgaaaggttggtcggaggggctggagaagcaactatactagccagagttggtgaaggtatagttactacagttggttcttctactagtcataagatagtattagaaaatcctgatgctatttcaaaaacagtattaaataaaggcttagatgcaggtactgcctttgagattctatccattgatatcgctgacgtagatgtaggaagaaatataggagcccaacttcaaactttacaggcagaagctgataaaaatatagctcaagctaaagctgaagaaagaagagctatggctgtagctaaagagcaagaaatgagagctgctgttgtagaatcagaagccgaagtaccaagagcaatggcttatgcacttagagaaggaaaacttggaataatggattattatgatatgcaaaatgttattgcagatacaagtatgagaagttcaatttctagcgcaggaaataaaaatcaatctctttctagtgataacaaagatcagagagacaaaaaatagactcctaggagagtgaaaactatgaaatatgatgataccattaatctattaaaaattcttgcaaatgctatattcaatcctacgtccatattaaacaataattcaagaaattttgttttcaaatatccaaatgcaaccgaaatgaacgatggtataaacaacacttctgatacagagttagagaatgacgatgaagaatatgacgaaggtgattcaattgacgatatagctagtgaaaacacgaattcttataataatacaaaaaatagctactatgataaaaaagaagcagcttcttcaaatccacaaggaattatagattctattacccaggaaataacaccagttagacttcaacaagctattatactttcagatatagttggaaagccaaaaagtaaaactagaaaaagaagattttaaattaggagaattattctatgaatataaaagtgcttatagttgacgatgaaataggaataaggaccataataaaaaaaatactagataaatctggtggctttgaagttgtcggagaaacagataatggtgaagaagctatagccatatttaaagagcaccgccctaatgtggtgttctttgatattgaaatgcctaagtgcaacggtatagattgtgctagagttttaacagatatagaccctaaaactataattatctttgcaacagcccatgcagaatatatgtctgaagccttccagttgtacgcttttgattatttgataaaaccgttcaaaatagaaagagtaatgcaaaccttagacagaattaaaaatttaaataaacccagctatggagatggtatagacaagataataaagcacgaaaaaggattagataagcttatgataaaaaataaagaaggcataagttttgtagacacaaaggaaattgttttagttcaaagggaagaaagttccactgttatatatacaaaaacagatagcttcacaacttccatttctttatccgatatagaagaaaaactagaccatactcaattctttagaagccacaaatcatatattatcaatttatcattgattacaaaaatctatccatacggaagatggacctatattgtgaaacttaaaaatacagaaaaagatgcattacttactcacgaaaaatatgaggaaataaaaaaactttttagtttataataaattaaaccttctagaaatagtaacataacattacttctaggaggtttttattataaaaaaataaattctatatatttttttatatgaaatatacggtaagttctataattgaatttggatctttcttatttttttactactcttcattaaaaaacgcaaataagttaactatcatctctaaaaaaattataataattggctgattatcatatgcaactcataaaaactgtatttgcatacatatttattcgacaaagtgatttcacttcaatatatgtaaatatccctttcattttaatttttaagtagaataatttaactaatatataaaaaatgagttttactaatataaataaatatattataattaaaaattgacaatgtattatcaaaatgcaaaaaaataaacactttaataaaagaagtataattattttgataatacgaaaatatttaaggaggattatttatgaaacaaaagctaagctttcagcaaaacttattaataggttcattattattcggactattttttggtgctggtaatctaattttcccagttcaaatgggacaacaggctggagatcacgcttttacagctactattggatttttaattactggagtaggattacctatattaggaattatcgcatcagctctttcaagaagtgaaagtttatttgatatggcgaggcctattagctctcgttatgcaagtatattcacatgcttattgtacttaacaattggccctttatttgcaattccacgtactgctacagttgcatttgaagttggaattcatccttttatttctgatggatatttgaaattaggactaattattttttcattaatattttttgcttttactatttatttttcattaaaaccaggacaaattttagattgggttggtaagtatcttacccctattttcttggtattattatcaattttattaatagctacatttgtaaatccaatgggacaagcaagtcaatttcctgctcaaggaaattatgcaactcagccattattcaccggtttattagatggatataataccatggatgcacttgcttctgtagcctttgctattattattatttctaacatacaaaaactaggagttaaaaatcctcaatcaattgctatagagacatgtaaatcaggtcttgttagcgttataggaatgactattatctatggatctctagcttatatgggtgctacaagcttaggcagcgttaaccgtgctgataacggcggaagtatattatctatggtaagcaatcattactttggttttaccggacaaattttattagcttttattgttggaatcgcatgtataaaaacagctattggtttgataacttcttgttctgaaatgttcagtgaaatgtttccaaactctgtttcgtacaaaaaatatgctgttctatttacagttttctctttcataatcgctaactttggattaagtaatatcattcaactatctataccagtacttatgtttttatatcctttagtaattactttaatcctactatctctattagcaccttttattaataaacaaagcgatgtttatagatggacaacaggattcacagttattgcggcattttttgatttatgtaaatcattgcctcaacctctacaagagaatttaatcgttaagcaacttgtgaattttgctcactcatatttacctggctttgattatggatttggatggataataccagcactttacgggttcttcataggactaatcatctggactattcgttcaaagaaacgcaaaagtgcttaaacataatatttcaaagataacttagacttatgcaataagcattcgaaaggagaaacattgttatttcacaggactatgaaaatttcgctgaaagtgctaaattgcaggttgcaccattaatgcttgctcccaatttcattgtgacaagcattaatgaaacaacctacaattaagagcttttaacagcttattttcaatgcctgctgcataaaaatgtttctcctttctagtatggtatttataatatgtagtttattgtttatatcacttatctattttcactttccacaagtctccggttgatttataaattataaatcaaccggagacttttacgcatctgtcttttcaaatgcatgtgatcgaaatctggtaggtgaatatattatcttttaaaaggcaatcttcaaaaccagtctttttcataatttatactacaaggaacacagtatttgcagatttgaatcaagtatgaatttttgagaataaaaaaataacctagcatactaatgctaggctcaattcaaactcttcaatttgtattatataattggtggctcacccgggaatcgaacccgggacaccatgattaaaagtcatgtgctctaccgactgagctagtgaaccaaaaattggctaggatgacaggattcgaacctgcgaataatggagtcagaatccattgccttaccacttggcgacatcccagtatggggtgaacgatgggactcgaacccacgacaaccagtgccacaaactggcgctctaccaactgaactacgttcaccatatttgactacaaaaattaaaattcaacttttaatttttaaagattaaagtattaccaatataggtaaaaaatttttatttgcttgtttattataagttacatattgttaattgtcaactatataaatataattaatgttaagtacagtaccaatcatatgttaaaaaccattatattcaaatcctaaagcctctttattccactgacatctcaacatttctagctaaaaatactcttatctaaaataaaaagaattattcatttaaatcataatctcattattttctgattttaaataaaattagaatcagttataataatttttaggggtgataaaatcacccctattatatgataataatcattgaaatatttctttatttaaatacctttatacgttcttctaatggtttaaattcttttgggcctggatccgctgttggctttccaaaaggcatttgcccaataagtttccaatcatcagatattccccattctttctttatgtcattttcaataagctcattataatgttgaagcgatgctccaaatccttcaatttctaatgcagtccaaataacaaactggtgcattccacttgcttgttgagaccaaattgggaaattgtctttataaagtgaaaattgttgttgaagagattctatcacgctattatcttcaaaaaataaaactgtaccataaccgcttctaaacgaatttattttttcttgagttggctcaaatttatcttcaggaacaatctttcttaaagcattctctgtgatatcccataatctatcatgatgatctcctaacaatagcactactcttgcactttgtgaattgaatgatgatggtgtatgctttacagcatgttctataatttcattgattctatcatcagaaaccaccttttctttactaattccataaaatgaacgtctatctgctacagcagtaaaaaaatcttttgacatataatcattcctcctatcatatctaaatttatttaagtatttatatttttttctttttaaataattacttatagtaatttaaaattatatctaactataactagtacatcttttatataaaaacagtgaagcctaataaatccacttcaatatttttaattagttacttacatttagtaagtaactttagattaattattacatacttataacacttagtcaatagtattttaaatataaattcataatttttttaattttcaaacaataaaaaaatataaagaatctccattgtaattaagaaaattctttatattttttgaattgtcttagttaattccatttttctgcccatttttggatctcatccatggcactctgaagatcacggcctttttctgtcaattcatattctatgcgcactggagtttccggataaacttttctaataattattccttccttttccagctccttaaatcgttctgtaagcatacgagcactcatattaggaatagcttcttctatatctgaaaatcgattttgtccattcaataatgttcttataatcaatccggtccatctttttcctagtaattcaaaagcattttcaaaccttgggcacatatgaaatttttccatatttaatcaccacctgttactattctatcataatcacttaattaagataagcaacttatgatattatactaaatataataatattcattgaataagtcaatattccgtaaaacttatgtattaactttgatctttatggatttccagaagaactttacaatataaaatatgaggtgcaaggttctagtacagttgcagcaaaagtcgaagaaaaactttcacacgaaggcataaaagtgaaaaaagacttaaataggggtctagatcacggagcttggactcttttaagacatctttatccagaagccaacatccccgttgttcaagtttcaatagactcgaacttatccattgaagaacaaattaaaataggtagcgctctaaaaactttaggtgacgaagatattttaattatcggaagcggaaatacagttcataatttaaatttagttgattttgaggctgtaagcaatgattcttgggctgaagaatttgatgactggttaattaacaggttaaaagaaaatgatttcaattcactttacaattatagagatcaagctccaaatgccgatttggctgttccaagccctgagcattttgttccgctatttatagcattaggcagcagttcgctattaattcctagagttatttttcgagagtatgaattaggaaatttaagccgtctttgccttgaattttagtaatctaatattttagcaggatatgatatactcaatcctgctttagtaaaaaatttaatagtatttttcctttacttctcttgtaaatccataatcaataattactggcctgccattaattactccccaactactttgtctattcaaatcacataatagtaaattataactttgagaaatattttttatctgttttaaatcaaacatttcttttttacttttaacatcaaaatatctccatatttccgtaatattatataccttatccgctctctccataattaagaactcaaaatttttcgaaacatctataaccttcgcaaacagattagaatcgtcataacgggaaatataatactctgttttattttgtgcaattccagctgcattctttgctatttttactacatatccattcccaagatcaaatacttctctacaagaaccggaaccaatatatctgcaatatcctcgtgttatactaaatataatttgattaatatccatttaaacacctgctttatgctcatctctttatattcattggtaaaattctacatattatattattcgctcgatacgaaattggttcgctatgcttttacaacttaattaattccaaataaaaatgtagctgaggaattttattttttcctcaactacatttatactttctacttatccggctcaacatgaaccattacctgcgttatatctagatcttctttcaatttatcttctattttttcggtaatggaatgtccctcaactaaagacaactcagaactgacactaactactaaatcaagtaaaatattatttccatgaacgcgcgctcttatattcttaatttgtttaaccccaggaacttggctaatagatttagttataccatcaagcttctctctactaaaaccatctgatagattatgagttgcctccctaaatatatcccatcctgtctttaatattaaagcacttacaactacagctgcaagaggatctatccaaggaaaaccaaactgagaagcaacaatacctatggtcgtaccaatacttacccatgcatctgacagattatcttttgcagcagccattagcccagagctttttatcttaacagcaatcctcatattataacgatataccatgtaaatagccgcagcacaaaaaattgccactacagcagatattaaatcaggagccttagggttaaaaaagataactgatttaatcgcattataaagcacatcaagaccaacagctatcataattaaagatgctattaatgatgctattgtttctgctctaagatgaccataaggatgatcatcatcagctggctttcttgatatctttaatccaattaaaactgccactgaagctattatatcggtagtattattaattccgtcagctaataatgccttggattgagcaaaaaaaccaactccgagttttaataatgataatgttatatacgctataatactcactctagccccacgttccgctatttttaaattattataactgttttccatactttccacccctgactatactatttttcaatgctatcttaataattatcattcttaaataaatttatgcaaaacatactcttcattgaagtaattcactttcaagtactttactataaggcaattacagcatatgatttgctataaaaatgtattttacaattaaagattacataaagttaattttccaaataacataagtattattcgttattatatctacatattatatgacactgaattttatagaccttatcatacttatatgtgtatatactaaacataacgcatttagcatttggttaatagtttcaggttagctaatatggccataaattaaatattattatcaaacagaaagtaattaaaatgttcattttacagataaattaaattaatttgctatggaattttctatatatttatcaagatacctttctaagtcatcaatctcttcatttttaggcaaacagctaattaatgtttttaaaacttctctctcctttatatagttaagagaaaatgaaaaatttaaatcaattatccaacttaattcatatatttttctatcattataattttccagtgaattattactaatttttttgtttgaacgaatgtccttaataagctctgaattatagcctgatgtaaaaggtaaattatcaagcgccggattaggatgattttttctttctctctcatatcccataatgattctgaaaatatcaagtttatcggcatctctaatcaatttgcaaaacaatgattcttccttattcaaatccatcggaagatcttttgcattatgaagatttacagctttaataataatctttcttctactgtcatctaagttttttaatgttccattctcttctaatattttaacgcctaaagcagcatgattttctgaaaaagcatccctaaatgtcttatactttttaaattgttcaaaccttcctatatcatggaataatcctattatctccgctgtatcaacttcttcttgggtgaaatttaaagattttgcaatatttacagcatgctctgcgacttttagcgtatgtatttccttaagttcaatattctgatttattaagctatcttccccataaaatttttttacataagagctaaaccaatcataatattctttaactaatatattttccatttttgtctccttactatatctaaatatatatctattatactcctttagcataaattacttaactataaaacttccttctatacgagcataggctttaattcacattcattacgaatccttaaagaataaaaataccttgacaatattcatttaatattgccaaggctttataatttaggatttgatcataaaaattatatttattttatgtttatatttattttccttgtaaatactcatctattgcttttgctgccttcttaccagcacccatagcaagtattactgttgctgctcctgtaactgcatctccaccagcataaactgcttctttagtagtaagacctgtttcttcttcagctacgatacatcttctcttattaatttctaacccttgagttgttgatgaaattaatggatttggtgatgttccaagtgacattattacagtgtctacatccataacaaattctgaaccaggaacttcaactggacttcttcttcctgatgcatctggttctccaagttccattcttacacatttcattcctttaacccatccattttcatctactaaaatttctgttggattagttaatacgtcaaagattactccttcttccttagcatgatgtacttcttctactcttgctggaagttctgattcacctcttctataaacgatatggctttcagatccgagtcttaaggcagttcttgctgcgtccatagcaacatttcctccgcctactactgcaacttttttaccagatctaactggagtgtcatatccttctactgctgctttcattaagtttactcttgttaaaaattcatttgctgaacatactccatttgcattttctcctggtattcccatgaatcttggaagtcctgcacctgaacctataaatacagctttaaatccttcatcttcaaacaattgatctatagttatagttctgccaactataacattagtttctattttaacaccaagtttcttaatgttttcaacttcatttttaactactttttcttttggaagtctgaattctggaattccatattctaaaactccgcctgctttatgaagtgcctcaaatatagttacttcatatccttttttagctaaatctccagcacaagtaagtcctgcaggaccacttcctataactgcaactttaattccatttttaggttctgttgcacttaaatcaacattatgtgatgctgcccaatctgctgtaaatctttcaagtttaccaatagatactgagtcaccttttattcctaaaacacatcttccttcacattgtctttcttgtggacatactcttccacaaactgctggaagtgagctgtattttgaaatttcttttgctgcttcttcaaatttttcatctttaacataagaaatgaatcctggtatattgattgatactggacacccttctacacatttaggattcttacagtttaaacatctagaagcttctttagttgcttcttcctcgttatatccgatacaaacttcttcaaagtttgctgctctaacctttggatcttgttctcttactggtattctaactaatctctcattcatgtccattatttatcacctctacaaccacagccaccgtgactatgagtatttccttcttcaacctctaactgtgcttttccttcttctgttttatacatagcttgtcttctcattgattcatcgtaatttactaaatgtccatcaaattctggtccatcaacacaagcaaacttaacttctcctccaacgg

SEQ ID NO: 91 - DNA, 24643 bp, Clostridium beijerinckii
atataatatcattattgacaaataagaccaaaaattataatataaaattaatagaaattaatatttttttatagtaaagataataaagtattgttttttaaaaatatatataaaattaaattataaaaagtaaaaaatataaagaaatttgtgcgtggaggagtggatgcgaaaaggattcttggaatctataattaatggagctagaggattcattataaaaccatataaagaagattacttagttgatactttaaaaaattatagtgaattttactagaatgtttgtggaggaagattatatgaatgatttattggatattcaacatattgcttttgaattagcaagtgagaagtatgctcttaagattagtgatgtttatgaaattattaggctgcagcaaatatctccaacacataatagtaaattctttctggaaggcgttattaatttaagtggaaaggtaattccggtagttaatttacataaaaggtttaaactaatagaatgcgctagaactaaagaaactagaataatagtggtaaaaagtagagaagagatgattggtataattgtggacaaggttgactcagttatacaattcaatgatatccaaccaacgccaaaagttgttgcaggtattgatggggagtactttgaaggaataggaattacggggaatggagtaataagtttattgaagatagatgtagttcttcatgattagggggaggtgtgaaatgtctaatatatatgaaatgcctgaaatggtaagtgcatttttggatgaagtggaagagcagatacaacttttagaacaaggaattttagaattagaaaagaaagatgaagttagtaaagttatacaagatatttttagggtagcacatacattaaaaggatcctcttcagctatggggtatgaaaagatgaaaactcttactcatgaaatggaaaatgtacttgataaaattaggaataattttatggaagtaacggagccaataattaacgttttgtttgaatgtactgactgcttaactttattaaaaagagattttatagaatataagaatgatacggaagtgaacattgatgatatcataggaaaacttagatgtattcaaagtattgacgtggacaaaactgaaggcaatcaatttattggagtaaaaagtgaaattagtcatgaaggtgacaatgagaggatagtatttgagctagatgatgagaaaagacatacaatagaaaatgaaaagctaaatgggtgctcttgtgttgtttgtgagattaagctctcagaggatagtcttatgaaagcaacaagagcttttcttatacttaattcgctaaatgatatgggagaggttataggatctagtcccaatgtattagaactattggatgaagatgaaaatattaatactataaattatttattaatttctgaattaggagcaaaagaacttgagttaagaattaagcatgaattaatggatattgatgatgttagtgtgtttgattatgaatttacgaaattagataaagaaaaggtagtcactcaggataaaaaaaatgtagctaatataaaaagagaaatggcaatggaaaaaaatgatgagataagcagtgaaaaaaaagtttcacaagacataagaaatgaaaaaaaattatcacaaaccattagagtcgatatagaacgtcttgaacatatgatgaatttagttggagagatggttattgaacaaactagaattgctcaagtaagtaacaatttacataataaatatatagctgatgattcagtagaagatttaattggaatatcaagtcgtgtatcaagagtagttagcgaacttcaagaaagcataatgaaagctcgtatggtgccagtgcaacagctatttagtagattcccgaggctggtaagagatcttgctaattcattagaaaaagaggtggagttggttctagagggtggagagacagaaatggacagaactataattgaagatattactgatcctttgattcatcttgtaagaaattccctagaccatggaatagaaaaacctagtactcgtataggcaaagataagccttcaaaaggatctttgaaaataaaggcatttcaccaagaaaaccatgtaattgtgacaattgaagatgatggtgctggcttaaatttagaaaagataaagcaatcagcaattaagaaagaagtaatttcagcccaagaggcagaagcattatcagaacaagagataataaatcttatttttcaaacggggctgtcaacagctaataatgtaagtgacgtttcaggcagaggcgtaggaatggacattgttagaaatcatatagataaactaaatggaattattgatgtagaaacaaaagaaggagaaggtagtaaatttacgattaaattaccactaactcttgcaatactcgcaggattactggtgaaaattcataatgaaacttatgcgttaccgatgagcaatataattgagattgtgagaaagcctaaagatgagattgaatatgtaaaaaatcaatctgttgttgttattagagataaagttcatcctctagtatggcttcatgattattttaaattgccgagggaaaataaaaagaaaaatgtattcattgtagttttaggtatcgcagaaaaaagattcggtattgtagttgatgaattagttggaaatcaagaaatagtagttaaacccttaggctcttacataggaaaaattgaggggatatcaggtgcaacaatacttggtgatggaagtgttgctcatatatttgatgtagtaggaatatcgagaatgattagtagcaaaaacataaaagaaaataataattttaatagcagtgaaatttaataagcaaaagatcagaaagtgtggaggcgtatataaatgggtagttttaaaagaaatattggaattaagcttataggaggtttaagaagggtagataatgcagtttttgcatctaaaaagcttgatgagaaattaaaagaattatcaaatataaatgaacaagttacaaaaggaacaattgatcaatcagaagctgtgaagtcagtaaattctctcacaagtgaaatggctaaatctataaatggagttgtgataaatgcagagcaattaacgaatgtcgctcaaaagtcgcaaagctcacttgaggaaatagctgtatcatcaaaacaggttgcaggtaatagcgaaagtgtatcaggttcaattgaagaaatatcaaattcaattgaggaaatgggtaaatcaattaaagtggtcgcaggaaatgcggaagaaatgactggatcagctaaggatgtttcagaatcaatacaagaaatggtggcatcaattcagcaagtagcagggaatggagagagcgcatcaaaatcagtagaagaaatttctttttcagtagagcaaatggggaaatcagttaaaggagtagctggaaatgcagaaagtttaacttcttcagcaaaagatgtgactgtatcaattcaagaagtagtagcatcaattcagcaagtagcaggaaatagtgaaagcacagcaagttcagtagaacaaatatcggcatctattgaggaaatgggaaaatcaatacaaggtgttgcaaaaaatgcagagggattgaaggatactgctgaaaatgcagaagcatcggtgcaatcaattgtagtatcaattgaagaagtggcaaaaaatagtgaaagtacagcaagttcagttgaagaaatatcatcatcaattgaagaaatgggtgtatcaataaaaggagtagctactaatacagaaagtttaaaagtttcaacagatgaatcagcagcggctatacaagaaatggtagcatcaatacagcaagtagcaggaaatagtgagagcacagcaagctcagttgaacaaatatcgtcatcagtagaacaaatgggtaaatcagttaggggagtagcaggaaatgctgaaagtttaagaggctctgcaaatgaagcggcggctgcggtacaagaggtagtagtatctattcagcaagtagcaggaaatagtgagagtactacaagatcagtagaagaaatatctgcgtctatagaagaaatgggaaaatctattcaaggagtagctggtaatgctgaagaactgcaaaaagcttcaaatgaaacttataagacggttgaggacatggcggcatcaataagtcaagtggctcaaaatgctcaaaatgtaaattcattaagtgatgtagtgaaatcagatgttaaggatggacaaacagctgtagctaatacattagtcgctataggtgaaatatctgaggttatccacaaggcagaaagtgtaataactaacttaggaaagagttctgataaaattggaagcattatagatgtaatagatgatatagcagatcaaacaaatttacttgctttaaatgctgcaattgaagctgcaagagcaggagaacacggaaaaggatttgcggtagtagctgatgaagtgaggaaactagctgagagaactgctacagctacaaaggaaatatctgaacttataaaaggaatccagggagaaactaccaatgcaattaaggcgatagaagttggaactgagaaagttgaatatggatcaagattaagtaatgaagttggcactgtaatagaaaaaatagttggtggaatagaaaatgtgactaatgaaatcaaagaaataactttggcaactgacagtcaaaataaaggaagcagagaaatactcgaatctatgagaaatgttactaatcaagcatctatggttacacaagctacaagggaacaagctataagtgtagaaaatgtaataaaaggtgtagcaaatgcaagagaacaagtagtgcaaattaatatagcaatgaatgaacaatctaaacaaggacaaaatattgttggagctgtcgaaaatgtaacaaatcaagccgatgaagttgcaatagcagtaaaagaacaagttattggcatagatgaaataataaaaggtgtcgaaaattcaagagaacaagtaagacaaataacagtagcggtaaaagaacaagcaagtcaagggggaaatattagtaaagccataaataacgttgttaatcaaacaaatgaggttacaatagcagtaaaggaacaagctgctggtgtagaggaagtaataaaaggtgttgtaaatgctaaggaacaagtaaggcaaataacagtagcagtgaaagaacaggcaaaacaaggaaaaaatatcgctttgtctatagaaaatgttgttaatcaaacaaatgaggtcgcagtagcagtaaaagagcaagcagcgggaattgatgaagtaataaaaggtgtggcgaatgcaagagagcaggtaagacaaattacagtagcagtaaaagaacaagcaaaacagggacaagatattgttggatctgtcgaaaatgtaacaaatcaagcagcgcaggtgactatggctgttaaagaacaagcaaatggagtagaggaagtaattaaaggcgttgtaaatgcaagagaacaagtaagacaagtaacgcttgcggtaaaagaacaagcaaaacaaggtggagatattgtagcagcggtacaaaatgtaacaaatcaagcagttcaaatagctgtagtaactaatgaacaaacaataggcgtagaagaaatagttaaaggaatagtaaatgcaagagagcaagtaagacaaattactgtggcggtaaaagaacaagcaaagcaaggggaaaatattgttgcttctgtagaaaatgtaactaatcaggcagcactggtaactacggctgttaaagaacaagccagtggagtagatgaaattattcaaggggtagtgaatgcaagagaacaagttaagcagataactgatgccatgatagcacagacgatacaaggaaaatcaatgactaagctagtagcagaggttacaagtcaaactgcagaggtaacacaagctatgaaagagcaagcagctggggttggcgaaatagtaaaaggtatagaaaatgccagagaacaagtaagacaaataacagtagcagtgaaagaacaagcaaaacaagggaaagacattgtagtttctgtagaaaacgtagcagaacagtcggagcaagtaacaagagcagtgaaagaacaagctataggagttgaagaagtagttaagggaataactaattctagagagcaagtaagacaaatagctgtagcagtaaaagagcaggcaaaacaaggaaagaatattgtaaattcagcagaaaatgttacaaaagtggcacaacaagttactgaggtatctaaagagcaggcatcaggagtagaaaatattataaaaggtgtaagatgttctagggaagatatgaagcagataacttgggccatgaatgaacaaacaaaatctactgatagaatcacagataactttaagaatgttacggaacaagcaaatgaagtaacaatagctactaaggtacaggcaagagaagttgaagagcttagaaaacatattgaagatataaataatgtagttaacttaaatgtaagggatgttcaaaaaacttcaagtattactagagaactttctgagtatacattagaaataaaaaaatcattagaggagttagttgaataactagataataaattctatatgagtatataagttgctacgggaaaattatattaaggctaattattagaattttgtaattctaaatttaaaaatatttagagcaacttatatattaaaggaataaattgtggttttaaatataaggaggaaattttaaattatgagtattatggcattagaacaattggcgagttatatatatgaattctgtggcattgactactccaaaaatcttccttcacttgaaagtaagataacctatagaattaaagaacttggacttagtgtttgggaatattgcggatacgttaaaatagaagaaaaagaaagagatacattaattgaactaataacagtaaatgaaacttatttctttagagaagaaaatttattaagagaattgcaaactaatgttttccctaaatttgaagactattcaaaggaaaaaacttttagaatctggtgtgcagcttgttcaagtggggaagaaccctatacattagcaatgttaataaaagaaacaatgctttttcaaaatggttctgttgaaataatagcctcggatattaataaaaaagtattagataaagctgaaaatggggtatacagtagtaaatctttgtcctttaggaagatgccttatggaatgttagataaatattttgataaaattgaagatgactacaaggttaaggatgaaataagaaaacttgtaaagtttaagaatttaaatatgtttgataaaaatatcgaacaagaagttggaagagttgatataatactctgcaggaatgttttgatatattttgatacagaatttactaaaaaagctgctctttcgttttacaatattcttaatgaaacaggatatttatttttaggccatgcagaaacagttactaatgtcaatccaggctttgatactgtttatactccatcgatcttttattataagaagggagagaaagcatgatgaaacaatatggtgttttagttgtagatgattcctcctttatgaggagatgtataagccttattatagaaagagatcctcaattttttataataggaatcgctagaaatggattggacgcaatagaaaagatacaaagattaaaacctgatatagtaacattggatgtagaaatgccagaaatggatggaataagtgccctaaaagaaattatgaaaacttgccctgtaccagttgtgatgctgagtaatcatacggaagatggtactaggacagcactaaaggctttagagctcggagcaatcgatattttcttaaaaggttcattagtaggggagaacataaaagaggaaacaataaatgattttcttagtaaactaaaagtaattgcaggcagtagtaaggtacaaaagaataaagaagatagtaatgcagatttagaaaatattaaatatgataaacagcagattaattgtggtgaaaaactcatgaagagggagctgcttattattgggtgctcaacaggaggaccatccgcacttcaatcaatattgccaagatttccaaaggatttatgcaggccagttattgtaatccagcatatgccaccaggatttactggaccgctagctgaaagatttgataccatatgtaatctacatgttaaagaagtagagaatggagatatacttgaacgaggaaaaatatatatagcaccagcgggatttcaaacactattagaaaaaagccaggataatagcatagtttttaaagttgaggatatgaaaaatgtagacagcctatacaagccatcaattaatgttactttaaattcggcagcgcctatttttaaagataagctagtctctgtaattttaacgggaatgggtaatgacgggttagcaggctgtcagaatgtaaaaaataataatggatatgttatagttgaggcagaagaatcctgtatagtttatggcatgcctaaagtagtgtttgaagcaggtcttgcagatagtcaggtagcactaagcgacatgtttgagacaataatgttaaacttataaatttagtttagatacatgaaaataaatatcaagtccaatgttgtcatgaatatttttcattagatacggagagaaattgaccttatagcgtgcatattaggtcaaattaccgacgaatgatgatggaaaataggttggtaaatggacttgttattttttgaatgtgagttacttatttaatgaagtaacttatagcttaatatagaattaaagcaaatttaaatgttaataagctagtaatatatatggctagcttgctaatatttaaatttattgcttttagacttgtatattaaaataggtaattgatataatgatttatcagaaggaaagatttagtttataatgaattatcatgtaaagcactcatatatttaaagtcatttttagaacggaaggataaagtattatggagattatttttacaatagttggacaagtaagtatcatgtacatattaatggcaattggatttatagtctaccgcaaaaaattaattaatgaagatggagccaaacaaatatctaatcttttagtttgggttatcaatccaatgattatgttaacacgctatcaaatggaattttctatagataagttaaaggagctaggaatttctttttttatttcgttatgtgcaatgttaataggcttttttgtgggtaaaattgtctttaagaaagatcagagaatagataaatttgcaatcggatttgcaaatgcgggatttattggaatcccactagttactagcataatggggatagaaaaggtgttttttttatcagcatacctagtttgttttaatatactgagttacacttatggaatatatacagtatcaaataataaaagtttaattaccttaaaaagtgttttgtttaatcctggaataatagctgtggcatttggattgcttgtttttatttcacccgtaaagctgccaaagcttttttatgatgcgtttaacttagttggacaaaccaatacgcctattgctatgattttacttggtacgtatattgctaagtcaaaactaattacactatttaatgataaacatgcttactttgtagcgtttataaaacttatcgttattccagttataataatgatattatttaaatttttaccaccgtatttaatagaaataaaaaaagttgtattaatagctatggctacgccagtagggcttacggtaccaatgttttcccagatgtatggaggagattatgagtatggagctaaattagttggcttaagcacattgctatcactgattactataccaataattttgtatctggcaaatgttatttggtaagcgactagtttatataacgtaatagttaattatagtcattcttatcatgctattagtcaagtttgtatatgaatgtggcttggatgaatcaaacactatggaatcaccaggagttaggatataagttatattatccacatttaaagataactcaccatcataaactattatatattcttgagtcttttcgccatgggaattggattcatatgtgctattgccatctagttctacagtaaaaagttcaaaattcctatttgaattgcttgcaaaatagcaataaactctatatttattatcaggagattcttggtgcttagaatcttctttttttattaaaatatcattttttattggctcatcaataagggatgtatatggaaccctaagtccaccagcaatcttccatattgtattaatagttggattagattcaccacgttcgatttgccctagcattactttactgacaccgcaaatatcagaaagtttgcttaagcttaattgtctttcatttcttaatcttttcaaattcccagcaataatattatttaaattcatattttcactccttgacaaatataaagtacaaatgtaagatatagcataatataaagtataacgtacaatgtatataatatatattacggttttatacaaaaagtatcaagggggcattttatggaattggggaaaataccaaatgattctttagaaataaagaataaaaacaactcgtattattttattcagggagtgaaagactgtattccaactatatttgggtacataagtttagggcttgcatgtggaattttgagtaaatcttgtggtttgacagtttgggaagcaatggggatgagtgcttttatatatggaggatcatcgcaatttatagcttcgagtatgattttatcatcgtcaccaatacccagcataatatttactattttctttgttaactttagacatttgtttatgagtgcgtcagtagctccatatttcaaagagaattcagtcttaaaaaacttttttatagggatgcttttaacagatgaaacttttgtagttgcatcagcagaggggttgaggaataagaaaattaataatttatggattacgggtttaaacattactgcatatataaattggattcttgcaacaggaattggcgttcttattggtggttttattccagattataaggctttagggttagactttgcattaacagccatgtttataggattgctaatttcatctgtaaaaggaaatgtaaagataagaaaagctttaataattattattgtatcttccatagtgttaatagtaagtgcaatatatgtatctactagtattggcgttattatatcagcaattgctggtgctttaattggggtggtgattaaagaatgaattcttatgtatggagtgttatcataggtggttgtattgtaactatgttgccgagagttttaccaataactatattatcaaagataaaattaaataagaaagtggaagagtttttgacatatatacctatatctatactagcttcattaatagtagcagaacttttaattaccgataataaatttttacttcaaggaaaatctccagaattgcttgctacaataccaacaatactgattgctcttaagaaaaataatttattattaacagtgctaacaggaattatttcaatagcaattttaagattaatattttaattcgtaaaaacttgaattgactcgatgataatctaagcgtattattttctataaataaattatagagcaataatggattttattatatggtgaaggaacaaatataatgatgtataaaattaaaatgacagagagaactaagatttgtttaaagaatagtgtattattttctgttctgataagtattttggcgcaaatatatatttatccatttaatagcaggtttgttttgggagttggagtcattgtaattgggcttatattttctatatcggaaaatatatatcctgttttaatcggaataatcacaggaactataactgcctctattcgtagcattggattattaatgtcatcttctagttattcaaatgatattataatgcagtttatgccggcagctattttttatattatttatggtattttaggaactatattttcactaactaggagaaataagtctataatacatttatacttgtcattaataagctttgatataatatgcaacacagcagaaatacttgttagaaatatgttttctatatcaactataaaagttattatagtaacagcacttgttagagcatttatacaatgttcagcttttttaatatataaatatcaaaaattatatattaagacactagagcatcaaaaacgttatgctgaattaaatttaatggtgtcaaaaatatatgcggaggctttttatttacaaaaatcaacaaatgatttaaatactataatgagggaagcttacaatttgtatgaaatgaataaggataaagaagaattttcagttaaggcgttatcacttgcacaaaatgctcatgaaatccgtaaaaataatgaccgggttcttagaggaatcaatcaattagtacaaaatgttgagaaggcggagtacatgtctatgtcagagattttctgcataatatctgataatacaaaaagacaaatagataatgtaaattctaatatatttataaaattcaagctagaagaagattattcgataaaaagatattatgatatatttgctattctaaataatttaattattaacgcaattgaggcatgcagtggcgataatatgataaatgtgattggggaaatttcgcaaaaagaattactacttgatgtttcagataatgggacaggtattgataaagatgtacttccgtatatatttaatataggattttcaacaaaattcaatgaggagacaggggcaatgtctacggggattgggttatgtcatgtaaaaaatctcttagagaatttgggaggaagtatagaagttgaaagtgatattgataggggcactaagtttttagtgaaaataccgttatctagtatataaattattttcataataagggggctatttatggaaacaacgtttgttattattgatgatgatatggcagtatgtaaaatattagagcaagcaattaaaaaaaataactttggaaaagtattatccattttaacgacaggaaaagatgccaaagatcaaataatgaaattaaaacctgatatcgtattaattgatttgctactaccagaagtagatggaattgaaattgtgaaaaggacatttaacagtggatatactggtaagatcataatgttatcccaggttgaagaaggaaaaatgatttcaaatgcttacaaaagcggaatacttttctatattaacaagccaattaatatgattgaaacaattagcattattaataatgctaaaaaacagattgaattagaaaaatctatatcaatgattaaaagtgtagtttttgagggcaatattgagaaagataaaaaagttgagaatgaagcggaaatttattctcaggaagaaaagctattgcgcatattttctgatattaacattattggcaccgcaggaatagaagaattaaaactcgtaatactgaatatcattaataaaaagaaaatgaatccatctaaaccttatcagctaaaagagatttatatggatgtggcacgagttctatatggagattcattagcagctattaattgcagatctatggagcaacgtataagaagaactattatgaaggctatggattcaatagctagtttgggaagtgaagatagcgataatagcatatatagagaatattcagcatcactttttgagataaagcaggttaaacaggaaatcaagcatttaaaaaatccaatatacagtcaaggaaaaataaatacaaaaaaatttattgagggtatattaataaaaattctaggttaacacatatataaactacagaaaactacagaaaacacagtatgttaaaattcattgactagtgaaatggaaaaatatataatttaataaagatttaaaaaagcaatggagctttggtatatatgccagggctcctttttgtattttaaaatttacagagtcgaaattactattgaaatataaatattagataaacataatcatcgaaaaaaattaataaagcaaaagttgattgatttctattgagttaatattgtgccaaaatagggggagaataaatgattaaattagagaatatagtcaagaactttggagatactcatgttttgaaaaatgtgaatttaaatataaatgaaggtgaaaaattggtcgtaatagggccgagtggatcaggaaaatctactttgattagatgcatgaattatcttgaggagccgacatctgggaaagtagtcatagacgaatatgatttaagtctgaaaaaagatttagctaaagttagacaatctactgcaatggtttttcaacagtttaacttatatccacatatgacagtgcttgagaatcttactttagcaccaataaaacttcaaaaggtaagtaaaaaagaagcagaggaatctggattgaagtatttagaaaaagtgggattaaaggaaaaggccgatgcttaccctaatcaattatcaggaggacaacagcaaagggtagcgatagcaagagcacttaatatgcatcctaaaataatgttatttgacgaaccaacatcggcgttagatcctgaaatgatacaagaggtattggacgtactaataggattatctaaggaaaatataacaatggttgtagtaactcatgaaatgggttttgcaaagcaagttgcggatagaattgtattcatggatggaggacagattattgaagaggctcatccggaagaatttttttcaaatcctaagaatgatagggccaaagcgttcttaaataaaattataagataagaaacataattcacggtgcataacgcataattaatgaaaaacttctacgaagttttaaaaaaatttaaatagggggataaatatatgaaattgagaaaattatttttagcgttaggattaggtgtatgtatgatgatggctggatgtagctcatcaacaccaacaaatacaggaggaaatactgcggaagcaaaagaaatacaagcaataaaagatagaggcgtattaaaggttggggtaaaagttgatgtacctaaatatggttacaaaaatccacagacaggtgaaatggaaggtttagaaattgatttatcaaaagcaatagcgaaaaaaatattaggagatgaaagtaaagttgaatttcaaggggttacagctaaaacaagaggaccacttcttgataatggagaaatagatatggttgctgctacatttacaataacggatgaaagaaaaaagagttataatttttcagatccatatataaaggatggagttggattacttgttaagaaaagccttggtgcgtcttcacttaaagatttagatggaaagactattggagttgctcaaagtgctacaactaaaactgcgcttcaaaaagaagcagaaaaggaaggaataactcttaagttttctgagcttggtggatatcctgaacttaaggcagcattagattcaggcagaatagattgttttgcagttgatgcatctattttgaatggttatgttgatgattcaacagtaatattaaatgatagatatgatcctcaagaatatggtattgcaactaaaaaagataatactgaacttgcgaaggaagtaaatgaagttataaatgacatgaagagttcaggtgaaatagataaattaattgcaaagtgggatattaagtaatgaacggaccttttgcaatatttaagtgggaagcactttttaaagattttaatatatttcttgagggattcttaacaacacttgaagtatcaatactagggcttatacttgccttaatgcttggaattatttttggagtactttctacaagcaaaataaaaatttttaaggtaataaatagaatatatgtagaggtgattcagaatacacctcttgtaattcaggtattctttctatttaatggattaccatatataaaggtggtattaccggtgtttttaattggaatacttggagtaggtgtataccatggagcatatatatcagaagttgtgagaactggtataacatcaataccaaaaggacaatttgaggctgcaaaatctcaaggattttctcatactcaaactatgaggtatataatattacctcaaactgtaaagattataataccaccacttgcgaatcaactggtaaatctaataaagaatacttcagtattagctatgattgcaggtggagatctaatgtatacagctgattcttggtcaagtgccaatatgtactatggcccagcatatgttataactggagcattatattttataatgtgttatccattagcaatgatttcaagaaagcttgaacttagagagaaaaagaaagcattagttgatattgaagattctataacagaacaatccgttgcaacagagggagggctataataatgtcaagtgtatttaatcaagcaaatatgatgtttcttttacaaggaatgaaattaaccctaattatagccattatatcaattgtattgagtatgttttttggaataattcttgccatatcaagaaatttctctaagggaattgtggggagaattgcaacaatatatatagagacatttagaaatacacctaatttactatggatattatctattagatttttggttccaataaaaccgatgtattcaggaatcttatcttttactttatttacttcggcggttacggcagaaatatttagaggaggaatgaattctgtaagtataggtcaatatgaggcagcatattctcaaggttttactaagtttcaaacattacgatatataatactacctcaaagctttaggcgctgcattccaacagttctatcacaatcaattactgtaataaaagatacatcttttctatgggctgttggtatagaagaatttacaggcaaaggtatgattcttatgggaagttttgtttcatcatctcagatatttttattgtttggagctatagctgcaacatatttcataataaattttacaatatcgtgttgcgttagaacaattaaaacagagtactagatataacctaattaatagatttgcaaatgtctaactttaaatctagatttatgatttatagtgaagatatgaacttaaaactttagaaaatttgtaagtatttttttgatgagtcaaaaccttaaaatgaatagagatataattttagagaataatttaaattagtcatttaaattattctcttctattatttgtatgcaaataatgaaaactatgctaaataaattagtgcttagtatacatttttgttattaggaattttatgctagaattagaaataactaaaataagatctgataataaattaaaggtattttacagattatatttaattgacgatgaagcaataattttaaggaggatgtatatgcctaaaatcatgataatagaagataatgagaatataaaaaaagagcttgtagagtttttaaaaagatatggttatgaagcttatgcaccagctaattttgaaaatatagtaaaagtagcactaaaggatgaaccggatttaattctgttagatataaatcttccatattatgatggctattatatctgtaaggaaataaggaaagaaaagaatatacctataataatagtaactagcagagatagtgagatggatgagattatgagtatgaatcttggagcggatgattttataacaaagccatataatacgcaaatacttcttgcaagaataacggctgtattaagaagaactctagggaacaattcgatttctgagatagttgaacacaatggtttaaagctaaatgtttctaatggaagcgtgatatttggagatgaaaagattgatcttactaaaaatgaatttaggatactgctttgtcttatgaaaaataaagagtgtatagttagcagagaagatttaatggattatttatggaattcagacctttatattgacgataatactttgtcagtgaatgttactaggttaagaaaaaaacttcaggaaattggatttaaagatggaatagagactaagagaggaattggttatatattactatgaatataaaggaatattctatttcaaagttgccatacataataattaatctaataatatactctttatttgcggctataatgagcatagctaaagcaccagttgtaatactatttgtagtttttattatttggtttttaccactatcaatctatataatcattgagtttataatgaaaaaaaaattctatgatgatattgtgggagttagtggcaaattagataaaaagtatttattacctgaggtaataaaaagtccaaattattatgaaggaaaagttatttatgaagtgttaagcgatagtaatagggatatgcatgagcatgttaacttctataaaaatcttcaaaaggagtatagagagtacatagaaacttgggttcatgaggtaaaaacaccaatatcatctgcaaaattaattgtagaaaacagcaatattaatgaaaagaaatcattggaatatgaacttaagaaaattgaagaatatataaatcaggctctttattactcgagaagtacagatgttaagaatgattatattgttaaagaatttgaaataaagaacataattcaggaggttattagaaataacaggcgtgattttattagcaaaaaaatttcagtaagtattgataatatttatgggacagtggttacggatccaaagtgggtaaagtttattataaatcagattattattaattcaataaaatatagtaaagataaaaatggagaagtgaaaatttacacaagtaaaggtaaagagaatataatattaaatattgaagataatggtataggtatttcgaaaaatgatttaaatagagtctttgataaaggttttacaggggaaaatggaagagtatatgggaagtccacaggaataggattgtatttatgtagaaagctatgtgaaaagcttggacttgggataactctagattcaatagctggcaaaggaactaaagttaacataatattccctattggaggattcatgagttttaagtaaggcggatggaattattattttttgattatgcctaatataggcttagcagaattttatgtatttctaaattgtataagacagaaagtctaggagattggttcctaggctattttttaatattggaaataaaaatgttttataaatgatattcattatttgcagtttttaattaaattcaattaatatttcaaattgttatttacatcttacgaaaatgtaagctgactgaaagatatttcaatatgagaaaaatatcaaaagatttaaaatgtagtcatgaggttaaataaatttgaaatgaatagcgattataaaagttgctataaaaataggaggaagattatggagaacattttaaacattcaaaatgtagaaaaatattatggaaataaagataatgtcacaaaggcacttgataatataagtttcagagtagaaaaaggtgaatttgttggtataatggggccttcaggtagtgggaagactacgcttttgaattgtatatctacaatagataaagtgactaccggatcaattatgattgatggagaagatattacaaggcttaaaagtaagaaacttgaaagattcagaagagataaattaggatttatttttcaggattttaatttactagatacattaacagcctatgaaaatattgcattagcattgactattgcaggaaagaaaggtagggaagtcgatgaattagtaaggaattcagctaaaagcttgggaatactcgaagtattagataaatatccttatcaaatgtctggaggccaaaagcagagagtagcatcagcaagggcaatagttaataatccaaaacttattttggcagatgaacctacaggggctttggattctaagtcagctaaattacttttaaattctattgaaacattaaataaagaattagaagcaacaattttgatggttacacatgatgcgtttacggcaagttatgcacataggatattattcataaaggatggaaatatatttaatgaattggtaagaggcgaggattcaagaaaagatttctttaacaagataatagatattgttacactacttggaggtgattcaaaagatgtattctagaattgcttttaataacgtaaaaaagagctttaaagattatactatttattttttaactttaacttttgcagtatgcatattctatagttttaattcaatcgattctcagtcagtaatggcagatatgaattctggacaaacggaatatgttaagataatggcgcagcttatttcttatatatccattggagtttctgttatattaggtggtttaataatatatgccacaaaatttttgattagtaaaagaaaaaaagaatttggggtatacatgattttaggaatgggaaaaagaaaaatgtcacggatattgctttttgagactttatatataggcataatatctttggcagcaggacttttacttggaatgttgtttgcacaagttctttctatatttacagctaagctttttgcggtacaaatgacccaatatagtttttcaatttcaataagtgccatacttaagactatattatattttgggttaatatacttattagttatgatatttaatgtgattatagtttcaaaatataaattaattgatttgttacatggagatagaaaaaatgaaaagatcaatattaaaaatccatatatagctctatttatattaatagctgcacttactattttaggttatgcttattatcttgttaatttagcaggattgaattttgatgatagcagatttaaattatcaatagcattaggaattgttggaacagcatttttcttttatgggatcgcatcggttacattctctgcacttaggaaaaataagaatttatatctaaatggtctaaatgtttttagtgtaaaacaaatttcgagcaaatttaatactaattttatctctatgacaataatttgtttaatgttatttgttactattggaactttgtcaactggactaggtgtaaaaaatgcttcagaaagctcattaaaaaaccaaactccgtttgatgcatcagtacatgtatttgataagaataatggtagcaagatttcggttttagatgcattaggacagctaaattataatgttgatgataatgctgactatgttgtacttaggcaatataagcataatatgagttctagagatgtattgggtaaatatgcactatctagcgaacaaaaggaaatgttaaattttaaagtattcgataccacagatatgattaaaatttcagaatacaataaattaagaaaattgaagggtgaatctagtatagatttaaaagataacgagatattagtgtgttctaattatgagcccttaaaaggattactagaaagctttattaaaaatgagaattcactacagatagataataaggaatttaaaataaaagataaaaaaattgaaactggagcgatattaacatcaccttcaagtgatactatgtttaccttggtagtaccagatgatttagtaaatggaatagataaatatgatgaggtcttaaatctaaattttataggtgataataaggaaaatgccaagaaagaattaactgctatatttaataattttaagtttaatgaaaatgaatataaaaatttaaactttagtctctatggtgggacaagagaaatggcatatgacgatagtagaggattatctgcaataatattatttgtagcagtatatatgggcattgtatttctattgtcaagtgcagcggtacttgcgcttcaacaattatctcagtgcaatgactctataggaaggtatagatctttaagaaagattggagcaacaaagagcatgattaataaaagtatattcaaacaagttgctgtattttttatattacctctagctctttcaatagttcattcatatgttggaattactgtagtaaataaatacttgatggtattgggctctagcaataaaatacaaccgattttaatgacagcattaatgatgcttattgtttatggtggatatctgtatgcaacatatgtggcttataaaaacatagttggaaatgaatatagatagaaataaatgcagtaatatgtattggtgaaactagcaaataataagtgtgatattaatatttgaaaataattgcttcggtagacaattatgttaagagatagtaaaatcaaattataataaacttagcataaaaggggaataccgaagcgatggaagaaaagtatctaggggaaatatataaatcatttttaagtaatataccttggccggtttggattgaaggaattgatacgacaataatattctttaataggtattatgaagatatgtataatataaaactggaagatgttaaaggcaagacaaataaagaggcttttcctttagagaaagcaaaaatatatgatgagcaaataaatgagtgcctaaggaaaaggaagacttatgttgtagaaggtatagtaaatgacaactgtgttgagtgttttatatttcccatactagataatgatggagagcctaaagccgtagctggtattataattgatataaatgatagaaaattaagagaagcagaaatagaaaaaacaaaaaaacatattaagaacaataattgatgcagtgccagaatctattttttataaagataaggaaagcagatttcttggatttaataagaagtttgaagatttttataaaaagagaggcgtaaaagaaataataggcaaaactgatttggagatatacggtaactacaatgaagcgaaaaaattcattgatcaggataataaaatcatggtaacaaaaaaggctacttattttgagcataggatacaaaatgagaatggtagagaaataattgaagagaatgttaaaatacctgttgtagataaagatggacaagtatggggattggtagggttatctagagatataacggaaagaaagatcttagaggaaagattacgatatttaagtgaaatagatattctcacaggcttatataatagatatagttttgaagaaaagattaaagaattaaaccatgagcaatatttgccattaggaataataatgggagatgtaaacgggcttaaaatagtaaatgatactttaggacatctagaaggagataatttacttagaagtatagctggagttcttaaagagatatgtcatcctaatggatatgtatttagatggggcggagatgaattcataattcttatacctaattgtgatgaatcaaaatgtgaaaaagttattagaaaaatcacaaaaaaatgcgaacaatcagattataaatttatgcaattaagcattgcattaggtgagggaataaaatattcattacaggaagatatatacgattgcataaacaaggtagaagaaaaagtatatcgacaaaaattattagaaaagaaaagtattagaagctcaattatggattcgttgaaaaaaagtctagaagagaaaaatatggaaacaaatgaacatactgaaagagtaacaaaatatgctttagaaataggaaaaaaattgaggttaaaaatttcagaactagatgagttagcattagttgcaagtttacatgatataggtaaaataggtgttaatgaagatatattattaaagccaggaaagttgacaaaagaagaatttgaaataatgaaaactcatacagaaaaaggatacagaattataaatgcatcgagcgagcttggaaatgttgctaaatgtgtattaacacatcatgagaaatgggatggaaatgggtatcctttaggattagttggagaagaaattcctttaatggcgagaataattaatgtagcggattcttatgatgttatgactaatgacagagtgtataagaaggctataggcaaagaagaagctataaaagagttaaaaaggtgctctgggactcaatttgatccacaaatagtaaaatgttttactgattatttaaaaaataagattccatattaattataattacctatgattggataatgttaattttactgaaaataataaattagatttaattaagtaaaaagcttttagaatataagaatgaaatatgatttagaggatatttagagaaaatatatcctctaagtcatatttttttattttttgagaatcaaaactttataaaaatacaagtgtgatgtaggttaggaataatgatattttaatat

SEQ ID NO: 92 - DNA, 24022 bp, Clostridium beijerinckii
taaaatcatttagtgatattagttatagttaagtataaagcgtgtgtagggaaattctaaaaatatgatgtaaaataatggataataaattaaataaaattcttgccaacttttacttgactcaaacaataacataatacggatttagaatttgatgtctttatgttataataggcaaagagaaaataaggtgtgtattatttttgaaaattaaaccataagaagaataagtaggtgaagatatgacaactgaaagaaagtttttgcccataagcaaaaaagatatgagagaaagaggttgggagcaattagatttcataattgttacagctgatgcatacattgatcatcatagttttggtactgcaattatttcgagagtacttgaagcaaatggatataaagttgggataataccacaaccagattgggataatatttatgattttcagagatttgggaagcctaaatatgctttcctagttaatggtggaaacatggatcctatggtcaatcattatactgtaagtaaaagattaagagaaaaagatttctattctccaggtggacaaatgggacttaggcctgatagagcgacaattgtttattgcaataagataagagaagcttataaagatatagatattgtaataggaggaatagaagcaagtcttagaagatttgctcattacgattattggagtgataaagtaagaaaatcaatattaattgatagtacagctgacttgttaatttatggtatgggtgaaaaacaaatagtggccgttgcagaaagtttaaagaataaagttcgagcaaaggatataacttatattagaggtacttgctatgctacagaaagtttagaagatgtgcaggattatattgaaattccttcgtataaggaagtatctacaaatagatataaatatgcggaagcaagcaaagtagaatatgaagaacaggattctgttcgtggtaatattatcgtacaaaagcatggaagtaaatatgtggtacaaaatattccagaagcccctttaaatagagaggaattagatgaagtatatggacttccatatatgagagattaccatcctgtttatgaagggaaaggcggaatagctgcaattgaagaagttaaatttagtacagtaagttcaagaggctgttttggagattgtaaattttgtgctataactttccatcagggaagagttgttcaaagtagaagtaaagaatcaatattacaagaagtagaagacattacaaaacttccagattttaagggatatattcatgatgtaggagggccgactgcaaactttagaaaaccagcttgttctaagcagttagcttttggagcatgtaaaaataaagagtgtttatctccagatgtttgtagaaatatggatgtagatcatactgaataccttgatttgttaagatctataaggaatgtaccaaaagttaaaaaggcatttgtgcgctcaggtcttagatatgattatattatggctgataaagatgatacgttttttaaagaattagtagaacatcatgtaagtggaaaattaaaagttgcgcctgaacatatttcaaaagatgtactaaaatatatgggtaaaccggctggtgaaacttatgataaatttgtaaataagtttgaaaaaataacaaagaaacttggaaaaaaacaatatataattccatatttaatgtcatctcatccgggaagtactttagaatgtgcaattgagcttgctgagtatctaagagatattaactatcaaccagagcaggtacaagatttttatccaacaccaggtacattggctacaacaatgtattataccggattagacccaatgacaatgaaagaagtttatgtaccaaagactaagcatgaaaaagctatgcaaagagctctgcttcaatataagaatccaaagtactatacactggtctatgaggcattaacacaagctggtagaactgatttgataggaaatggtccaaaatgtcttataaaagacaaaaataaaagtgtcaaaggttataattctagcgtttccagaggtaatgaaagccaaggaactaataggaaaaagccttcagacagattaaaggctgatagaatttctgatagaagagaaaaaggtaagaaagcaaaagaaaaaaactcgccaaatggcaaaaagaagactattaagaaaagataaaatagtaaatagcattgtaaaattgctgaaatgaaagaataaagtgtttttgttagatcttatatttagttcatgagttgtagcaatttactaatttaatcgatagtatatattgaaattaagaataagttattgatttttcagcatgtatttgcatacatgctgaagttaaatttctacattttgatcctaatttggtagttaagtattagagtgctagatgtggatttttattatttcggtatgattaagagaaaggggtaaaaatgggggatattttaataaaagcgtttagctttatattgattattgcgataggatatagttttaaaaggataggggtttttgggcctaaagactataaaattataactaaaattataatgaatattactttaccgtgtgcacttattactggatttgcaaattttaaaatggatacatcaatgctttttattattttgcttggatttttgggaaacattataatgtctttcgttggttttgttttagctaggaataaggataataaagaaaaagcctttaatatgctaaatttagctggatataatataggatgttttaccctaccatatgtgcagagttttatgggtgcatatgctgttgggataacaagtctctttgatataggtaattcgattatgtgtacaggaggcacatatgcacttgcatcaggtgttgttggtgaaggaaatgatcaaagcattagagcatttcttagaaaaatgttctcatctgtaccttttgatacttatatgcttatgtttatagtgacaattacaggtattaagttgccacaggtgatatatacagtaacttcaaatctaagtgcaggaaatgcgtttttgtccatgcttatgattggcatggtttttgaatgcaaattccgaaaagaacagctagttaaagttgcttctattataagtatacgttacttgtttgcagcaatatttgcagttattatttatttttgtgtaccgttctcaatggaaattaagcatgtactagttattttggtatttggcccagttcctgttcttgcaccagtctttacggctagatgtaaatgtgatgaaggcttagcgggggtagtaaattctttatgtatacctataagcatagttataataactttattgttgtttattattaattagtataatcgaaaaagtaatattttgataaatggattaaaccactaggcataaaaagcatgtggttttttgttatgttaataaattatttactaacataatacgtatgttctaataataaatctatatttaaaactctagaggtcaaagtgtccacttaaatctaatagaaagtaaaaagataattgtgatatatatagataatatttctaaaatattatataataattattattatttaagattttaaggaggagatgaaattgaaaaaattaatctcatggaacgtaaatgggttaagagcctgcgtaaaaaaaggctttttagaatattttaaggaaatagatgctgatatattttgcatacaagaaagtaaacttcaagaaggtcaaatagatttggaactagatggatatacaagttactggaattatgctgaaaagaaaggttattcaggcactgctgtatttacaaaagaggagcctttaactgtaaaaagaggtattgggatagaagaacatgataacgaaggaagggtacttactttagagtatggtaatttttacttagtaaatgtttatactcctaattctaagcaaggattagaaagacttgattatagaatggtatgggaagatgtatttagaaaatatttaaaagaacttgagaaaaacaaacctgtaataatttgtggggatttaaatgttgcacataaagaaatagatttaaaaaatcctacatctaatagaaaaaatgcaggatttacagatgaggaaagatctaagataactgaactattagaagcaggatttatagatacatatagatatttctatcctgataaagaaggcatgtactcatggtggtcgtatagatttaatgccagagctaataatgctggatggagaatagattatttcttggtttcagaaagtcttaaggataaattagaagatgcaaaaattcatatggaagtaacaggatcagatcattgtccagttgagttgacaattaatctataatagataaaaaacaaagcataataactatatttgagtagttggttatgctttgtttttttactcattgtacaataaatctttttatgcctatccaagcggtaaagctggaaatgaaagatagtataccaaatgtaagcatcaagaaaagcggaagtgatataggaaaaaagaaaatatgaattcctaatattagtgcacaggctaattcgcctaacaatgtatttcttatacacacaatacaaagtaatatagaatttttaaaaacatcttttagaggaagagaaacagtagtaagcaacggataaatatacatggatgcaagtgcaagtaaaactgtgataaaaagacataaatagaaaacaaaatagaaaatagatttctcttgagctaattttaaataaaaggatagtgaaacacctaaaaatgaaaatgcaattaatattattaatccactaaataatgattgtttccagttgtttttaaaggcttcatggaaatctgaaaaaatataagtatgctttctttggatcatagacattaaaattgaagtcatagcaccgaaagctggaccgattgtaataatagggagggaatataaaacaaagacaaaattcaatttaattatatcccaaaatctcatagtaaataattcaaaaaataaatgtataccttcctttggaggctcgtccttttctatatcaggaccttcgcgttcgaaatttggggttaatagtttcatattaatcaatctcctcaaataaaatttacctaatattattgatatatttattttagataagtttaaagatagtatatcatttgaaaatttaaagttcaagattataaaaacatttacatgccattaagaagttcgttataatataaaacatcttaagttttgtataaaaaggtcaaaatatgatttaaataaatctaaaataatttaaataaatataacttgaaagtattgactttaatagatataagtatataataaatttatgataataagttgcaacttaaaaataatgcatatgaaaaggattactggtggcaaaatatcgataaattaacaaaagaattaaataaactaaaaaaatatatacataaaataatttaaaaggaatacaagtttattgatatactttaaaattaattaaaataaagcgcgtatttgtacaagctttgtttataagagttattttgatcactgtttttaaaggcatatatttaattaataaaaatgaaatggtgttcactaaatatattaacttcaaataaataatgggaggtaaaaatatgaaaagtgtaaaaatattaaaaaaacttgctgctattgctgctgtaacatccattgctgcaacaatgttaatcggatgtggtggaagtagttcgagtactagctcgagtggaggaaaggattcagcatcatcttcttcaggagatcagttagaaatgtggacatttattgagatgcataaaacgttttatgaaaagatgttagaaaaatggaatcagaaaaaccctgataagaagttaaatattaattttacagttcttccttatgatgatatgcataataaattgcaatctgcactcttgtccggacaaggagcccctgatgcatgtgatatagaagttggaaaattccctaattttcttaaaggagacccacaattagagaatcttgatgatgttatttcaccttataaagataagttggttaaatctcgtatagatctttacagtaaagatggacataattatggactaccaacacacgttggtgcatgtgtagcatactacaatactgaaatcttagaaaaggcggggattgattataaatctatagctacctgggatgattttaaagcagcaggtgctaaatattatgctgcaactggtaaaaactttgggacagcagatacaagtgctcaatggcaagaaagtcttatgctagcagaacaaaaatcagattttactgatgcggatggtaagccacaattaaatagtccgcaaatggttaaagcacttactacgttaagagatttacaagatgcccatgcaatagctactattccaggtggacaacctgaccaaacagatgctgaaggtgcgataaataatggggactatgcagttgcaattatgcctctttggtatatgtcaagatttttacaatacatgcctgatcaagcaggtaaatgggcaattgctccggctccagtatttgaaaaaggtcaactacgttctgtaggtttaggtggtacaggtacagctgtaactaaaacagctaagaataaagaaaatcttaaagaattcttagcatatgcaaaactttcagatgaaggtgaacaggcaatatgggaagatttaggcttcgatccatgcaatactgatttatggactaaaaatgatattactcataatccagaaaataagtttgtaaaatactttaagactaatccttttgatacattaaacgaaatcaaaaatgaaatacaattaattaaatcaaatgatgctattccaagtataaacaacgttttaaatacagttacattaaatagcatatttgaagataaaaaagatataaaacaagcattagatgaagcacagcaacaagtagaaaatgaattgaaataattaaaaacatccacacagagaagctttttacaagcatattgagttacaaagatggcttctctgtattatttaagcgtgggaggaggaagttaagaaatggtaaagagatttatatataataaaaaagcagcaccatatgtatttatattaccatttattcttgtatttttactttttttcatatctccaatggtaaatacggtaataatgagctttgagaatgtattaccaggatcgagaaaatttgttgggtttgaaaattatacaaaactattaggggataaggttttcttagttgcgttatggaacagctttaaatatatgatatggacattgatattgcttattccaattccaatgatacttgcatgtataatagacagcaaactaatggttggaaaagaattctttaaatctgcattatatttaccggctttaacatctgttgctgtggcaggtataatatttagatttgcctttggagaacaatctacttcattaatgaatcaggttgttgcgctatttggaatggatccatttaaatggctaaaaaatggaactacaggatttatagtattgctagtattggcatgttggagatggactggtgttaatatgttatatttcttatcaggacttaaaaacattcctgcggaattatatgaatcagctgatatagatggagcaaatacattgcaaaagtttagatatataacaatacctcaacttaaaccgacaacaatttatgtgcttactatatctatttacgcaggtcttgcaatgtttatagaaagttatatggtatttaatggcaataactcgcctaataatataggtcttacaattgtaggatatttatacagacaaggtattgaaaaaaatgccatgggttatgcatctgctgtaggattagtattgtttattataggaatggctattaatttagtgcaattaaaactaaatggaacatttaagaaaggagattagtatgcaaagcaatattagtttgaataataaaaaaaatacgcaaaaaaatgcagtaagtcatgtaaaaaatttgccaaaaagaatattaatttttatgctttttgcagtcatagccgtaatattactaattcccttttatacattatttgtttctacgttcaaggatggtgcattagtaatagcaaatggtatggatgtatcaatagatactgctaaaatgtcgtttaaaaattatataattctattcacagaaaaaaatagcttatttacatggttttttaatagtttatttttaactatagtgcaagtagtttgccaattgtttatcagcgcatttgttgcatatggtttcgcaatgtacgattttaaaggaaagaattttctatttatatgtgttttattcgttatgatggtaccttttgagattttaatgttacctttatataaccaaataagtgatatgcatttaacaaatacctatattggaataattttgccgactatagcaagtgcatcaactatatttttctttaggcaatacctctccggaataccaagagaccttgttgaggcaggtaggatagatggggcatcggaatatggcattttcttcagattaattttaccgattatgaagccatcttttgcggcaatggctatattaaatgcaatgtttagttggaataacttattatggccaatgttagtgttgaaagatggtgcaaaatttactttaccaataggattaaatacattattaacgccttatggaaacaactataatttattatttgtaggttctttcatttcagtaataccagtatttattttatttgcatgcttccaaaaatattttgtagaaggtatgacagctggagctgtaaaggggtaatatgatttgattttcactaaggactagaaagtccaaactaaatacttaaggagatgaattataatggcaaaaaaagcaaaaatggtggtagacaaagactttaaaatatccgaaatagataaaagaatttatggttctttcattgaacatttaggaagggcagtatatggagggatttatcagccaggccatatgtcagctgatgaaaatggcttccgcaccgatgtaatggaattagtaaaagaattagatgttccaattataagatacccaggtggtaattttgtatcaaatttcttttgggaagatagtgttggagaagtagcagaaaggccaaagagactagaattagcttggagaagcttagaaactaatgaaattggattaaacgaattctcaaagtggactaatgctgtaggatctgaaataatgatggcaataaatcttggaacaagaggaattgcagatgcctgcaatcttttagaatattgtaatcataaaggtggtacgaaatatagtgatttaagaataaaacatggtgttaaagaaccacataaaataaaaacatggtgtttaggaaatgaaatggatggaccatggcagatagggcataaaacttctaaagagtatggaagattagctctagaaacaggtaaagctatgaaattaatagatccagatattgaattagtttcatgcggaagttcaaatacagcaatgcctactttccctgaatgggaagcatcaactcttgatcatacttacgatgttgtagattttgtatctctccatcaatattatggtaatagattaaatgatactgcaaacttcttagcacaaagtgatgatatggagcactttattaaaacagttacttcaacttgtgattatataaaagcaaaaaaacgtagtaaaaagactatgcacttaagcttcgatgagtggaatgtatggttccattctaataatgaagatgatgatataatgaagaatcatccatggcaaaaggcacctgcacttttagaagatatgtataattttgaagatgcacttttagttggattaatgttaattgttttaatgaaacattctgatagagttaaaatggcatgcttagcgcaattggttaatgttatcgcaccaattatgacagaagaaaatggaccagcttggaagcagactatatactatccatatttgcatgcatctaaatacggtagaggaattgcacttcaaccagtagtttcttcgccaaaacatgatactatagattttactgacgtaaaagacgttgaatcgatagcagtatataatgaagaaaaggaagaagttacaatatttgcagttaatcgtaatttagaggaagatattgaattaacttgtgatgtaagaagttttgaaggatttaaaatcattgaacatattgtgttagagcatgataatatgaaaatagtgaattctccaacaggtgaagctgttactccaaaatctgtagatagaagtaatctggttgacggaattataacttcatctttgggaaaagcgtcttggaatgtaattcgtttaggaaagaataaataaaaagtaatatagattaaataggatttaacgactaaaattaatagtgttaaatcctattttattggcaaagaatcacatccatcaaaattaccaatgaaacattccatattatgacaactgcgattacaaaagtatattacttatttctggttagaaaacatttgaaatggtatataaataaaataagaagtaatatttatgccctataaatattacttcttatttattataaaaacggatctaattcaatatattttaatatatattgcaaaaatgattcttcattataattctaaaaatattgcaataattttagttgcaattgtgaattgtgaaatgtgcattgtgaattgcaacatatatataattagatacaatgatcaacatcaagattcttgagttaatgtattataaacaagtcttatgcttatgccttgattgtaattgccaaagttttttccgaaaatagttaatccaccaacgtgttttgtttcttctggaacagctaactttagaaggatatcacttttataatttaattctaaatcttctagagtgacatctgaaatctttattccatcaataaaagttccgaaggaatttatgcttaaaagttttagtaatccgtattgattccaatgaggattccaccaagatggagtcaaaatacctttactatcaccaaaatctccaggactggtccatctgccaacattgacattatttaaatagaaatgtatatcagatggccatatgctacatactccaggagcttctgaacttatttccatagatatttgcaattcagagaatacttcacttggttttaaatagttagggattctatattctatacttcctttagtgaaccaaagaatatctgcattaattctttcaggatcagcaaaataatttggattgtctacctctcctataatactatccttagttgcaattccgcatgtaggggcaatatcataattagaatagtggcctatatttaaatctatatgatatgaattttctacatcttgtttaccaatatctattacaaatttatcctcgtgaagagaacatatcttttgtaatccatgctttccagttaaattagtagtttttattaatccacactcttctaatttttttatatgcatagtaactgcaccattagttaaatcaagtttctctgataactcattcatatttaattgcttatactgtgataaaatctctaatatattcattcttacatccgaacttaaagccttgaagagtggtaaactttcctttagatttgtaatgtgaatcataataatctcctctgtgttgttaatattcgttgaatcgaaattaatgtttaaatattaatttcggaaaaattgtacttaagttatagttcgttataaaattatcaaataataatatactatgttaagattattatacccttttatgaattagatgtgaataatcattttaaatatttttaaaataaagtcacaatataagaagttattttttgtttaagttttttctaaaatatgcatttttatattcagttggtgtgacatcttcaaattttttaaaaagtttcataaaatgcttatcatcattaaatccaacctgaagagcaatttcttttattgagaaagatgaatttaatagaagttgtttagaagcataaattcttgttttgttgatgtattttaaaagagacgtaccagtatattttttaaatgccgaagaaagataatcctgattgtagttaaatgttttggcgattttatgtgcagttaaatttgaattataatttatatttatccagtttgcaatttcatttattttgcaattggtattagatagtttttcattttgatgaattatattatccatgaaatcttgagagatttccattgccaacaggcttaatgcataatttgttaaatattctgaataactctttttgtttgatagatcaagtagttgacgaaaaataaggcttgttcttgcggcagaagaaattgaaccatattcaggtaaaatataaacatctgaagaggctttttttaattcattatcaagattgaatatagaatcattaatttgttcagcgtttaaaagcttatattcagcagaagtaattctaaaatgacaccaatagtaagaaagattcccttcagattttttataaccgtagtgagtatggaagggaaataatataataaacttatttggagtaagttcatattttttatcatcttgtgcaatgtatagtgttcccttacaaccaattagaataacaaaagtatcgaggtttcttttagaatgtataaaattttcattatttatcaattttccactagaacaatgagtaaggggatatttattatcagagataaaataaaacatataggatttcaccacctattatactaaaatgaaagttgtttctatataataaatatactatagttatatgtataaaagctagtcatatgcttaaataagggaatttgtattttagaggaatgaataaaatagtttttgataattataataaattaaccaccataaaaataaatttaggaggaattaataatgaactcaaatacctttagtaaacctttgcaaataaatcgtataaatgtaaaagataatttttggaagaaaatgatggagctagcaagaactcatgtgattccttatcaatgggaagcattgaatgatagaatagaaggtgcggagccaagttattgtatgcaaaattttaagattgcagctgggatgatggaaggtgaatttaaaggttttgtatttcaagatagtgattttgcaaaatggatagaagcggttggatattctcttatgtggaataaggatgaaggacttgaaaaaattgcagatggagcaattgatattgtttgtgcggcacagcagccagatggatacctagatacttattacattataaacggattagataaaagatggacaaacttacgtgataatcatgaattgtattgtttaggtcatttgattgaaggggcagtagcttattatgaggcaacagaaaaagataagttattaaatgcaatcgtaaaatatgtagactatgtggatactatatttggaccagaagatggcaaattgcatggatatccaggtcatgaagtaattgaattggctttaattaaactgtacaaaataaaaaaagataaaaaatatctaaatttagcaaaatactttatagatgaaagaggcaaatcaccattatattttgaagaagaggggaaaaagtacaataataagttctggtgggaagatagttactttaaatatcaatattatcaagcaggtaaaccagtaaaagagcaggaagttgcagaagggcatgctgtaagagctgtatatttatattcaggaatggctgatgtagcaagagaaacaaatgacgatgagctgctagaagcttgcaagcgattatggagtaatatgactaaaaagcaaatgtatataacaggtggaatcggatcatcacaatatggagaagcatttacttgtgattatgatttgcctaatgatactatttatgctgaaacttgtgcgtctattggattagttttttttgcaagaagaatgcttgaaattgaacctaaatcacaatatgcagatataatggagaaagccttatacaacggaattataagcggaatgtcaattgatggaactaagtttttctatgtaaatccattagaggtggttccagaggcttctgaaaaagatcatttgagagcacatgtaaaagttgaacgtcaaaaatggtttggatgtgcatgctgtccgcctaatctagcaagacttttgacttctataggaagttatgcatatacattaagagatcatacaatatttatgcatttatacatgggaggagaaatatcagctaatttctctggaaagagtgtagaatttaatattagaacaaactatccatgggatgagagtatagacattaatttaaacatgaaggaagaagctgaatttgaatttgcattaagaattcctgaatggtgtagaaattatgaaataaaagttaatgaagaaaagataaattacagtgtagtcgatggatatgcttatattaataggaaatggaaagatagtgatagaattagcattttatttaagatgcctgtagaaatagttagagcaaatataaatgtaagagaagacatgggaaaagttgctgtaatgaggggaccagttgtttattgcttagaggaagaagacaatggacctgatctgcacagagtttatttaaagagtaatcctaaatttacttatgaatatgacaaagacttcttaggtggtgcaatagtacttgaaagtgatggactagtagttaaagaacaagattgtgataaagataagttatatgtatatgactctaaaattgaatttaatgaaaagaagttaaaatggattccatattatttatgggctaacagaacaccaggagaaatgatagtgtgggtaagaaaatgtatttagttcaataaagcttaaaattaagtaacttgtacgctgtttatgcagatgaatatagtatataattttaaatgaacctaaagcaaaaagcataaacgtaggaggtacttagttttgaatgaaattttgactaaaacaatagaagaaatggcggatatggaatttgactgtggctgcggaaaaaaacatagaatagacataaaacatatctatgttggagaaaatgtatataatagaattctagatgtcgcaaaagaaattttaccaaaagaaatcttattggtcagtgataataatacttataaagcacttggcaagtgtgtagaaaatgaacttactgaatcaggttataagataaataatattatattatttagtgatggagatttaattccagatgaaaaagcaattggacgagtattggttgaagtaaataatgaaacagagcttatagttgctgtgggatctggaagtattaatgatatatgtagaataataagtgcaaaaactcatattccttatgttataatgggaacagctccatcaatggatggatatgcatcaacagtatcacctctaattattgatggagcaaaggtaacatatcctgggactaatccatatgctattatagctgattcaaatattatgaaagatgctccatttgagatgatatgtgctggatttggtgatatactaggaaaatatacagcactttctgattggagattatctaatacgattcataacgaatatttttgtgatacaacagaaaagctagtaaggaatgctatgtataaatgttttgaaaatatagaaggagctgttaagagagatgttaaagcaatagaatatatatcagaagcacttatactatcaggaatagcaatgactctttcaggaaattcaagaccagcatcaggagcagaacatcatctttctcattattgggaaattgataagctttcaagaagactagagcatcctttgcatggcaattcagttggagttggcacagtaatatcggcatgggtgtataaaaaacttaatattgaagaaaggtttgggatagagactcctgtgccagaaataataataaatttattaaattctattggagctaagtctaatccaaaggcgttaggaattgagaaagaattatttcataggagtgtaattcatgctcttgaaatcagacctagatatacgattttgcaatatgcaaaaactgaaaatatgttagaagaatgtgcaaatgaattaacgaatttattttacggagaatgataatatgctaaaagataaaaaattatttttattagatattgatggtacaatagctttagatacaacattaatcgatggtacattagaatttatggattatgttttaagtataggtggtaaatatatatttataacaaataattcaacaaaaagtatagaagattatattatgaagtttgatgactttggaattaaagttgataaaacaagttttgtaacatcatcttatgcaaccgcaatatatctaaaagaagtatataaagataaaaaaatatttgttcttggaacaaaatcatttattaaagaactaaaaagatttgagcttaatattacagaagataaagatgaagatattgtttgtgcagtagtaggctttgataatgaattaaattataaaaagatagaggatatatgtgaattactatcaacaagagatattgattatatagctactaatccagatcttgtttgtccgactagctttggttttgtgccagactgtggatcaatatgcgaaatgattgaaaatgcagttaaaagacaacctttatacattgggaagcctaataaaacgatagtggaaatgtgtctagaacaaactggatttacaaaggagcaaactttagttataggagatagattgtatacagacattgcctgcggtattaatggtggtgttgatacagctgtagtattcactggagaagcaacaaaggaagatttgaaagatacagaatttagaccaacatatagctttagtacaatcaaagagttatatgaaaagttagctttttaatatacttttagtaaagcaagtattacaagctgttaagaatgaaattgaaattttgtttttagcagcttttttatactgtagataataacattccatgatagttttggacttattatttattttatgtgcttaattaattctatacaatttgtttataataattattagaagaatataattttcgtatcgctaagataatgattttgatataatatttttataacataactagataggaggagattatagaatatgaatttagaatatattatgaataagttgaaagatgagaaaccatatattaatggctggaaaagaatgagaaggtcagctataattattccactagttgagattgataatgaagtacatgtgttatttgaagttaggtctaaaaaattaaggagccagccaggagatatatgctttccaggtggaaaaatagatggaaatgaatctcctaaggaagccgcgcttagagaaatatccgaagaacttggcgtaaaaagcattaatatagtaaatgaattagatactatagtaaggtatgatggcataataattcatccgtatgtaggaattattaaagatcttgatgagataaagataagtgaagatgaggttgatcatgtgttttatgtaccgttatcttatcttttagataataagcctcgtatatataataataaaataaatattgaaagagataaagaatttccatatgatttaattgttaatagggaaaactataaatttagagaagctaattatagatctttattttataaatatgaaacttataatatatggggaatcacagctgagatgctacaagattttttggagaatttgtaactaaccataaaaaatgaatcatttctatcaatatcataacaattcccataaaaattagtttttttactctaaacattgcaggaatagctatattgcttggaaatatgtataaaaaggaattaacaaaagaagtctagagctgagagtaaaatcttggctcttttttcatacctagaaatagaattaggggggaaataagattggattaagtagtaagctacagacaaatacattaatggattatagagaattatagggttttaagatgataattaaaaattatattattgtacagcattaatatgggggcggtttagtaaggagaaaaattaaatataagtggaatgaaagtcgcgagtattattagatagtgataaatttatttatatttaatgaaaataattgtaaggaaatgatataatttacataaagcgaaacgaaattataatttgtatgataggttggattaacaatttgttggtaaatgaaattctctgataccatgatttaaacgataagaatatatgtgtaatatttaagtcaaaagaatcaaagctattttacggcaatatttacgagtcgtgaatattgaaaaatgtgtagtgggaaaaatattatataaatgatattcaagaaaaaacaaatttatacagatagagaatttaaagtaggaatagaattataaaatctttggaggtaagtatggatcaaaaaagagttgcaggagaaaaatcagcagaatatataaaagatgggatgatattaggattgggaacaggctcgacagcttattacatgattaaaaaagttggagaattgattaaaaatggaatgaagataaaagctgtagcaacatcaaaaagtactgagagtttagcaagagaacttaagatccctttattatcaattgatgaagttgataagattgatttagcaattgatggcgtagacgaaatagataatgaatttaatgctattaaaggtggtggtggagccttatttagagaaaaaattgtggcgagtttggctaatgaagttatatggattatggatgaaagtaaattagttgatggtattggagaatttcctttaccagttgaaatattaccatatggatacaaacatgtaattaaagaattacaggattattcattaaatcccaaaataagaatgaaggaagaagagatttttgtaactgataatggtaactatatagttgatttgcatataggaaagccaatgaacattaatgatgtttataataaagttaataaaataactggagtactagaaactggattatttattaatatgtgtgatcgtattatcattggaacaagtagtggcaccaagattattaataatagcaacagtcaaaatgtgaagatggagcaatttagatagatattatctcatcttagaatgtatgcaggggggatgatcacatgataagggaaataataaatgaagattttaatggattaatgcaattatatatgcaacttcatggtgaatctatgccaggaaaaacaccagaaataatggaagtatggaatagaattttggaagataaagaacatcatattattattgcagaggaagaaggaaagatagtgtcttcgtgtgtttgtgtcataataccaaatttgacacacaatcaacgaccatatgcatttattgaaaatgtagtgactgataaacattatagaaataaaggattagcaacagcttgtttgaactacgcaaaagaaatagcacttaaagagaagtgttataaattaatgctattaactggctctaaaaaagatagtacgctaaacttctatgaacaagcaggatataatcaaaatgataagaccgcttttatacagtggatataatataaattgcaatttatctgagaaggagaaaagagatggtttatttgaattattttacattccctaatgaggatatggaatttgactttttcatgaaggtaaaaagaacctgttatgactcgttttatccgtttaaggtattgtcacaacatggtcttaaaagaattgattttgaaccagttactattctgtatggaggaaatggttctggaaaatcaacagcgttaaatgttatagcagaaaaaataggagtaagccgtgattctatctataataaatctaatttttttcctgattatgtcaatatgtgtgatatatatgttgaaacagatattcctaaaaatagtaagattattactagtgatgatgtatttgattatatcctaaatattcgtagtataaatgaaggaattgacataaagagagaaaagctttttgaagaatatttggagtctaaatattctcgattccaaatgaagtcgatggcagattatgaacaattaaaaaaagtaaatactgctaggagtaaaacacaatcaaaatttgtgagaaatagattaatggataatttcagagaatattcaaatggagaaagcgcatttatatattttactgaaaaaattgatgagaatggactatatatattggatgaacctgaaaatagtctttcgccaaaacgtcaaatggaattaatgaattttattgaggactccgcacggtttttaagatgtcagtttattatatcaacgcactcaccatttatacttgctatgaaaggcgcgaaaatatatgatctcgatgaaaatcctgttgatgtaaaacggtggacagaattggaaaatgtacgtacatattatgactttttcaaaatgcatgaaaaagagtttaaataataaaagatgggagtgttagagtgaataaagaatttttagaatctgaaagattatttttgaagcccgtatcttttgatgttaagcatatcttaacgaaagcagttccaatggcaactgaacgtataaattcattaatggagatgggctataagccaattaacaaaaaattcattatatatgatgattattactgtagataaatttaatattaaaaacaatataaagaataatataaaacttatttttttagaatttaggcataatcaaaaaataagaagtccatctgccaagcctattttttaccatcctgcgtcagtaaattaccctaatagagacctgctatgagactaatttgcttcctcgcctgatgagaaataatcataacattttggacttgctattttctttaatatgccttaaaattataaaaattctgagctcttaattaattataaaattaattattgaaaatctcctttgcaaccgctacagcatttaatacctttggaaagccgacatatggaatgcattgtaagaatacttctactatttcttctttagagatcccaacgtttaatgctccattaatatgaacttttaattggttttcgcaccctcctagtgtagtaagagcagataaagtaacaagttccctttgttttaaatcaaatgttggccttgtataaatatctccaaaagcaaattcaataatgtattttccaaggtctggagctatatccttaagtgattctattacagctgttccagcgtttccatcaacctcgttaagtttatttagccctttttcatatctattttccataattgtaatacctcctactttttgataatattatcatatatgctggagttaactccatgtcaagaggtaggtgattattttgaattattatataggagagttttctgaaaaaattggtttgagcattgatacactaagatattatgaaaagcttggtctgatttatcctgaaagagatgaagctaacaaaagagtatattctgaaaaagatattgagtggctaaaatttataatccgattaaaggaaataaatatgccaattaagcagatacaatactattctaaattgagatatgatggcgatgatacaattaaggaaagattagaattacttgaagaacaaatggacaggttaaatattgaaaaaagaaaaattgaagaaaatataatacacttggataaaaagattagtatatataaggaaatgatagataaaaaataactaatgtctgttaatctaatttttatgaaataatatatgggaggattgaaatgagcaatatgaaagcaattatatggttttttcctatgctatttataatccatgattttgaagaaataatttttatccaatcatggataaataaaaataggtattatttatctgaaaagtttccaaagttatcaaaaaagttattgcctcatttcgataatattacaacagcatcttttgcttttggggttgctgaagaatttattttaattatcataattactattatttcgtacaaagcaaattggtttaatttatggattggcctatttattgcttttaccacacatttaataatacattgttttcaagcattaataataagaaaatatgttccagcaattgttacaagcattatctttttgccaatttgtatttatattattaaaagtatagccaaagtgtatacatcaaatattattatttcatattctgttttgggattcataattatgttagtgaatttatatattgctcacaaatgtatggacttattttccaaacagttatttaggtattagaaatttaaatttaaattaactattacaacatatataatagttattactttattgttgaggtagataaacttaatctgtaggtaccatattccatgattttatcaagtaataaattaatttcatccatattagagcatatgactttaagcaaatagcagccatctccactaatcctatgtgcctcagttataattgtattttctttaataaattttgttaatttatcatgttgtgtggttttcatgaaaatagtaataaatgcagtaatgtttttgcccagcatagaattattaatgcatacagtatactgtgttattatacctaaatcctgaagtcgtataattctattggatactccttgaggggttaggtttacatgctcgccaatttccttaagtggtatttttgaattaatcaatagtatgtctaaaatcttcaaatctatttcatcaaacatagagcctaaaatcctttcatttttaaagagaaactaacgaatctctttcacatttcaaccttaatttaagatactattagtataacaaatataagtagatcagcaaatgtaaaggtggaatgaaaatgaaaaaagcattgctagtaattgatgtgcaaaatgaatattttacaggtaaactaaaagtaacttatcctaataatagctttgataatatattgaaggtaatggattatgcaaaagagaataatatgattgttataattgtgcagcatacagcactttttggagacacatttattaagaattcaaatggatgggaattacaaccaatgattcttgagaaatcgtacgactatattatcgagaaaactaagccaagcagtttttatgaaacaaatttggaagaaatattaaaaaaagaaaatataactgagatagttatttcaggatatatgactcaaatgtgctgtgacacgacagcaagggaagctttccatagaggttaccacgttgatttcttgtcagatgctacaggaactatagatgtaaataatgaagtaggtgttataagtagtaaagatcttcataaagctactttaattgctcaaagtttaaaatttagtaatgtaataagtactatggaatggatgaaattatctaacatttaattttgcatagtacttatattataaatagaatatgaattatatctataaatgatgctagggttaaaagtagctttctttgttacttttaatcctattatttttataactagaaaaataaagaagtttagttttgaaaaattcctatatatttgagaattatagaatggttaaagtgcagccaattaagcattcacagctatcttattcttttttgttaaaggatattaaagtatctacataaaattacaaatgtgaaagtgagtaataaaagat

SEQ ID NO: 93 - DNA, 24018 bp, Clostridium beijerinckii
ctacatctatatttgtttttccttccattttcttatttttttctattttaatttaacttatgctgaattttagtattaatatatgcaaataaatatataataatatataatagatatttttgcaatttggaggtgtcttaatgaataataaatataatgatttattcgatgagttagttaaatcatattacaatggtaattttgatgaaactcttaaacgtattatggtatgtcacaaaaagtctccacaagaaacttttgagattattagatcgttgtgtggagttgatatggagttcgataataattatgtatataatctaaaaaaagcaattacagaatatacagttaatacaagattaattgaaaaacttaaaggctgtaatgaatcatgtcctagaaatgaagacggtaaatttagctgtcaggttgcttgtccttttgatgccattctttatgatgaagaagaaagatcaacatacatagataacgataaatgtctaaattgtggtgtatgcgtggattcatgtaagcatggattaatattagataaagtttattttcttcccgttttagatttaatgcagaacaataaaaaagtctttgctgcagttgctcctgctattagcgggcaatttggcgctgaggtcactatggatcaaatcagggctgctcttataaaaataggttttactgatatgatcgaagttgcctttgcagcagacgtattaacaataaaagaagctgttgaatttgataaacatgtgaatgggcctaaagacttgatgattacttcatgctgctgccctatttggataggaattcttagaaaagtttacaaggaacttgttcctgatttatccccatcggtttcacctatggttgctgctgcacgaatgataaaaagtcttgattccgatgcaaaagtagtttttataggtccatgtattgcaaaaaaagctgaagctaaagataaggatttaaacgatgcagtagattttgtattaacatttcaagagcttgacgaagtattcagaactttagacataaagcctggtgatttggatggtgtaccatctgttgagtacgcttctagaggcggaagattatacgcccgcagtggtggcgtttcaattgctgtatcagaaacagttgaagaacttttccctgaaaagcacaagtattttaaagctgcaaaagcctctggagtaaaagattgcaaagaacttcttgaaaacgctctaaatagaaatgttgatgcaaacttcttagaaggaatgggatgcgttggcggatgtgttggtggtcctaaagcaataattcctacagaacaaggtaaggaatcagccgataaatttgcttatgattcacctataaaggttccagttcatagtaaagtacttgatgaggtattaaataaacttggtataaattcaatagatgactttcatgatcatgaaaaagtaagtatttttgaacgtgagttttaacctaattttattttgacttcttaatctataatttcatctgaatgctaattaacataaatatttatagtatattttactaaaaaatggctgtataaatctacagccatttcatatatgaattgcaattgttaatcttactaatttacagtttcaagagccttttttactttaggaactacatagtggctactacctctatctttaacatcttcaatcatcattactaccaatagattattgggagatttattagtggtcatcccaacgaaccatcctaattctgtaccattattatcatcctgagatgcttttatctccgctgttcctgtctttccagctatagttaacccactagtataagctccatgacctgtcccacctgaattttctactacttgtatcaaatcttgaagtaccgtattagctgagtcttttgatacaacattagctttccatactttgttatctgaattatcctttttcacaagatatggtgttaatatatttccttcattttgaaacatagtgtaaagcgctgctagatgcacaggatttaccaaaacttcaccttgaccatacccactgtctgctagttgtacctcagatttaaaatccttatcacttgaatattgtgaattatataatggatattcaaatggaattttatcaacaaatccaaagctatttaacttatctctaagtatatcctttccaatatctaacgctgcctgagcaaagtagatattatcagaataaacaagtgcattcgatagatttgacggtcctttataatcgcttactcttgtaactgagtaatttccccaactgctatccttcttccagctaaggccagttatatttttatttgcattgggatctatcttttttgtatctaaaccaataaccgcagtaattggcttaaaggaagatccaggcactaatgttgcctgaaatctattatacataggttttttaggatcattattcaaactattccactcatcacctgacatgcccaaaacaaaatcatttggattaaatgctggtgtactaaccaaagctaaaacctctcctgtattaggattcatagcaactgaagttcctttatcactaccaagctgactatataataagctttgtagactgctatcaattgttaattttaaatccgcaccgtttttaacatcttttgttataattgattttttcttttcgccctgaatactttgaatatatatttcagcaccatcaattcctcttaatgtatcttcgtatgttttttcaagccctgatttaccaattatagaattttcagtatactcctcatctttatgtttatccaattcatcagcatttatagcttgcacatatccagttagatgtgctacctgctctcctagagaataaactcttgcatctttatcattaattttaactcctggaattttaagaaggctcggaattctttcatcaccatatggtattgcctttaccggaataaacatatctggtttaacatatgatgcatttagttgactgtttatataatcaacagttatccctaatacttttgagatttcatcaattgatttatctttgttttcacctaagtttcctggaacaattccaacgttagatgaaaaagaatctgttgccagtttaactccatttctatctaatatgtctcctcttttagattttattattttaactcttattttgtcgctatcagctaagtccgggaatattgcttgagaattccacattaaagcataatcctttccaatcttcctactcatagttgcactatttgaaaattctaattttccacatatagtatccatgctggtttcataatatacggtagctttatcaccatctttttttacattttttacatagatttcaatattactagcaccaataccttcataaatatttttgttccttgtaataaaatcatctttggacatcttttgtataatttcaccatctgccaaatcatacattttttcatattcttttgaatttaataagctaaagtactccagtaatttattttccggtttgtgtgtcttattgtaaaaaaagaaagcagctaaactaataataaatggaattactactattcctgcaccaattaatatataaatatttttctttttatccataaaatccaaccttctctatcttaaatctatcagtaaattataccatataaatgtatatctttacatctcgaattccacattattaaaatataaagagagactacttttatattttcgcaatctctcttaatctaatatatatttatataattcacttatttttcaagcataaaagtattatcttcgtataacttctactttatatccatctggatcagtcacaaaataatatcctggtttttctcctggtaatcctttcaaaggcgtaacttcgtatcctagttctatatgtttttctctcatttcttctaagttttcaacacctattgcagtatggctgaatccatttcctaaatcgtatttttcaacaccataattataggtaagttcaatttcatatccccccatctcatttgataaataaacaagggtgaatttatgttctgggaaatcttttcttctagtctctataagacctagtgcatctctataaaactttaaagattcctctaaatttttaactctaatacaagtatgcaacatttttactgacatttcagttcctccttaatttaaataattttataatttatttgcatcaatagtatatatttctctatacaacattactttgcatttatatacactaatttcttatattaatataccacataaaatgcaaataataaaatagtttcctattcctaaaataaaagtaaaactaattctaactattttcctaattagaaaaatatagcataatgtcaaattatagtttataatattatgatgtatttattaaacactaattattattcaattatcatttgaattttcaattaaaattaattagaattacaaatttataataattatcaaggaggcaatatttcatgaaattactaaaatatatgcttatttttattccaataagctttatagcagaatttgttatgcatgtatctccatcaataatgtttatacttgcagcattatctatagtaccactagcaggacttatgggtgaagcaactgaagaaatttcattctactcaggccctaagattggcggttttttaaatggcactttcggaaatgcaacagaactaataatatcattttttgctcttaaagaaggcctttttgatgttgtaaaatcttctatagctgggtctgtaatcggcaatatattgttagtacttggtgctagcatgcttgctggggggctaaaacataaaactcagacttttaacaaaaaagtagttgaagtttcttcaagtatgttactatttgctgttgttggcttgtgtgtacctgctttatttacccatactgtggacccaactcttttgaatactagatatgaagggttaagtataatagttgcaatagtaatgctttctatttacattttaagtcttattttttcattcttcactcacaaagatatttatacagtttctaatcaagaagaaggtagtgctaaatggacattaaagaaagcaatatctgtattagttattgctacagttctagtggctatagaaagtgaattcttggtaagtggaatagaatctataacttcaagcttaggacttagtgaatttttcgttggtattattttaatccctattataggaaatgctgccgaacatagtacttctgttgtaatggcaatgaagaataaaatggacgttgctttggaaatagctattggctcaagcttgcaaattatattatttgtagcaccagtattaatattcttaagtttattattcactcctatgagtattgttttcaatgaatttgaactgattggccttattgttgctgtattaatagctaatagagtttccaacgatggagaatcaaattggttggaaggagttcaactccttgctgtctatttaatagttgccgcatcattctttattttgtaaaattcaaaaaataatctaattccattttaatgcaatacctcataatttcttatttataaaattatgaggtattatttttataaccacttatttttcttgaaccatacaccacataacacaactacgctgacacttattgaaatcacaaagggatatccataactccaaccatattccggcatattaaaattcattccataccaccctactataagagtaagtggcaaaaatatagtcgtgaccaccgtgaataacctcattaattgattttgatttatgtcaacttgagcttgatatgcttcccttacttgagtaacataatctctaagattattcacattctgatatagtctattaatacgattagtgaacattctaaagtatcttattatttttttatcaattaatccattatcattttcttctatagattctgcaatatttaataatctttcataatacctcttcaattttaataatttttttctcaacataataatcttctttaagtaattatcattctttgaagtcattaagccttcttcaagtgctgcaatttcatattcaagttcttcaatatgataagtgtcctcaaatgtaagtttatcaaaaaatgcatataaaagcttgctaagattcaatcctttaatctcacccgttttactcttagaaatcacctcttctagaatatcatttccatcacttataaatacaagtacgtttttctgaagaaacatacttactttttttgattgttttaatacattattaattataggaatctttaaagatatgtaatctagaccttcataactttcaaatttagatgttcttccattcatacaatcatataataatttttcgtttatattgaggatgtccgaaactgatttaagttcatcaaatttgatgacaacaacaaataatttattattatttgttgtaatactttccattttatcactttgtaatatatcattctctaaaacatagaccatttttaatctcctaagtataaatttattatattttaacatattatcataatcatttcatcatatccttaaacttcataatgattcgttaattaaaattcgtttatcgttatgatacttaaattttaacatcataaatattctccttatttaattccaaatcaataatctaaagctacttgtaatttttgaattattattttaaattttgttatatggttagtttactatataaaatttatatttctgcacataatataattaacttagaaaggaggctttttaatgcgaaaaggtacaaaaatagcaataattgtagtaataattttgataatagttggtgttcctataagtagttataatcagttggtttctttagaacagactaccaattccgcatcttcaaatattgatactcaattgcagagaagatcagatctaattcctaatttggttaatacagttaaaggatatgctacacaagagaaatctatatttactgatatcgctaacgcaagaagcaggctatctggtgcaacgaatatacaggaacaggctaatgctgataatcaactttctggttctctttcaagattattggctatagtagaaaattatcctgatctaaagtctaatcaaaatttcagggatttatcagttcaattggaaggaacagaaaatagaattgcaatagcgagacaagattataatactgctgcaacaaattataatactaaaagaagaagttttccagtcaatatagtatcttcattatttggttttcaagaaaaaccactttataaagctagcgaaggttcaaaagaggttccttcagtagattttacaaaatgataataaaattaatacataaatttttaaattcattattatgttttcttcttttagttacttcttccctttgcctcctttcagcaaacgctgaaagtaaagttccttctccaacatcttacaaatatttaaatgattatgtccatataatcaacgaaactgaattaaatagtttaatctctatcggaaaggaattagaagataaaactggtgcacaagctgttgtagttatcataaattcaactaataatgttcctattgaagactatgctaatactctttttagatcatggggcatcggagaaaaaggtaaagataacggcttattgattcttttagcgttaaacgatagggcgtggagagttgaagtcggccgcggacttgaaggtgctattccagacgttttaagtagcagaattatggaatcagttgctaaacctagttttatagaaggaaaatatggtgaaggattacttaattcttatagtactttctgcgatcatatagcaaaggaatataatgttactctagataaatcattaaatatctctgaaaaaaatacaaatgctattaagtctaataccacaactaaggtgtttggaagtataattctaggcgtgctattgctagatattatatttaatagaggtaggatttctttttcactacttcaaattcttttctggagtagtatctttagaggccgtggtcccagaggcggatcatctggaggaggttttggtggcttcggtggtggttcctctggtggtggtggctctagtggaaactggtagaaccaccctaaaccataaaataaaggtgctcttctaaacgatattttataattttctgaatatcagtagtaatatttttctgcaatgttcatctatcatgattagggttattactaaccttatttatcgctgttgtaacttgtactattatatcagtttcaacttgttgtttagtactttctattttggccattatctttcccaaaggtgttgccacatagtacggttttaaattgttaagagaaagtgtgaagatgtctcttttacatttatcgcatttacatccatctgtttttgctaacaagatttccatatactccttaacccatatttccatataattaataacattctccattatgttttctccttaatattaaagtcttaagcattatctaatctttaccactgataatgaaattataccacaattttctaacacaacaattatatcactaatttttgaatattttaacccttataaactcatttatctgtatttaaagcaataaaagattagttctgctaaactcatcttttattgctttatacttgttagtttgctcactgtacaaaaatattttatacaatatttattcctttttaagaattttaatttgatttatataattaagtatatctaggtaacaatcaccttttttctgtatgctatatactatgttttgtaattgttgattttcagttcttgattcctcaactaaattagttaaatttgttgatatttcctttattccatgtaaattattcttttgagaatcttgaactccttgtacatgtttatatacttccgattcagcatctactattttatctagtatagacgaagatccttcaataattttagttgttttatttataacttcagttccttcattggatttaccagataattgctccattgattttgttaaatcatctaaggaattcataatatctttggcatttttctgagtatcaacagaaagttttttgatttcattagctacaacagtaaacccttttccagcttcaccaactctagctgcctcaatagctgcattcaatgacaataaatttgtttgctgggcaattccatttataatattagcaaacccttgaatgctgttatactgattttgtatctctgaaattaaactgataaattcatcaaaaaccttagagactataccgacccgattgattaattcattaaaatcatttcttgcattatctatttcttttttagaattatcaagactaaaaaaaacaccttgcacaagactttctgtcttatcgctattattagataaaacttgcaaatactcattaacattttctgtttggttagtcgtatattcagctcctttaagaagcctgtctaatacgtatgtcacattttcttcttcattaataactgttcttatattattttccattatagatgttaactccataacttcatctacgtataggaaacattcctctttttcatttatgttaacttcattttgattttgtatagttcttattttcttgcttttaaatttaaacatcccaatatcccccttattcaactgctaatattaccatagtttgatttacatgttttttataaaattgttctccatagcttacaaacccggtagtattagggcaaaatgagaggatttctttatctattgctttccaaatattatcttgttgaaattttaaacttcttaatatacaatggattgatagtataaagctaggtttaaatccgatttttctaactgtatcttttatttgacttattggatcgacaggctttagaacctctacgaaagtacttgacataacttggctataaaatgtaattgatttatcagcatttactttcataggagaagatataaaaatttcatcttcatatattttgcctaaaggattatttataaaataattaggaaggtcgctttcttttatgtttaaagctcttgcatattcagtgctggctggaactttattgaatgtctttatcgttctacttataggatcggcttcagttactaatagcctttgccccattggtatgtatatattttctttaattatactagttcttctttttatgttgaagaatattactgcactattgacacgtttttctcctatgaatataaatgtttctttaaatttaagattatctccagcacttccacctatgactttaaaattatcatctgtaaaatagagggtacctataatactttcttccattccagttaaaccatcacataataaaagtgcaaaagcattctcattatttcttattttttcataagccttttttaagttatttatgctttttattggtggataacttatttctataacttcaccatcacaaagctcatactggaatccagagataattccattttcataaccatttttcccatactctccagacgtagaacaaagtataacattttcagatactaatttggataattctacaacattttctacatttgaaaataatataaaccccatattagtattattatttgtgaacctggacgcttcttgtacgttcgaaaatattaaatttatcataatcctatctccaccttaaatttttcttaaatgtaaaaattttctcaaatttcattataattatatccaatttttctacaaaatacaatcacacaattattctctcattaattaaatttattgtatagatttaactaaataaaaacttaaatatttatatatacaaattaaaaaaacttaaaataaaagatataaattcaaaatgagcagcgcttaatttgaatttatatcttttgattattaacatattctatattaataaattttatctccatcgtttcataactaatttaattagttcctgtttctcatttgatttaggatcttcaattacaatatccagcaaataatttaagatttcaccaatcttttttcctttattaaatcctaaggataataaatctccaccattgattttcaagttctttaaagaaaaacattcatcgttatcaattatttcattaaaattactttctgcctcatccaaatttattaaatgttttttagagtatttagagtcctgagcaagtatatccgctcgctgaattttaattagatctttaaaaagatctatacctatttctctcaatagtttttttatagatactttattatccatcctatagtcatgatactgtataagaagtgtaactttattaattgtattattatcatatttcaaatattttaatatttcattggctattcttgaggattcttttgaataagaactgcaatgcaaattgtcattttcatcagttcttattgtgcaagcctttccaaaatcatgaaatagcatactcaatctcaaatatatttgggattctacagtttcagttgctataattacatgattatataaatcatgtgaatggcaagaattgtttttattaaaattatagattttgcttattcctggaactatgtattctaaaattccacattccctcaatatttctatttttcttggattattaagtaatatcttattaaattcttctctgattctctcttttgatatatttcttatattatctttaagttcttttattgaattcagtgttaacctatcgatagtaaaatctagttgggcagaaaacctaattgccctaagcattcttaatgcatcctcgccaaatctttttctaggttcacctacagttcttattaccttttcatccaaatcctctatcccattaaaataatctactaatccacttatattattatatgccattgaattaatggtaaaatctcttctcgccaaatcttcctttaaagaactcacaaacttaacctctttgggatgtctattatcttcatattcaccatctgatctataagttgtaatttcataactctctttatttaacattactgtaactgttccatgctttaatccagttaatataactttatcaaataactccactacttctagtggcttagcattagttgttatatcccagtctttaggttcttttcctagaatacaatctctaacacatcctccaaccatataagcctcatatccattttctaataacctatcaatgattaatgcaacatttttaggcatctctatatttttattcaatatttcacctctaaacttatcattcttatcaaaataaatttatctttatctaataaaaacaagctgccctcataatcatctgagaacagctctatttactagaattttaatcatctgcaacatttctattattataagaataaacattatacgtctgccatatttgttctaaattaccaaaaatatcagatatgttttccttctctcgcattcctactgcaataattagtgcatttattaccgacataggtgcaactaaagaatctacaaatgatgccatattactttgtgcaattaatgtgtgatcagctttagacgcaagaggtgatagtaaactatccgtgagagcaaccactttggctcctctatcttgtgaaaattctaatgcatcaatagttttagcagcatatcgaggaaaaccaattcctataactaaatctccatctcctacatttatcatttgttcaaatacatctgaaattccataacttacaattttaacattttgcagtattatatttagataaaaccctaaaaactccgcaagagcagtagaacttctaagaccaattatgtatattctatttgcctcaaaaatcccctttactacgtcttcaaacgtgttttgattaattttttcaagagttgcacgtatattttccatatcagcttttagtacaccttttaatgcatctccatcagaaaaataatcatttctaagctctaatctctgtacagttgttagcttattctttataagttcttgtaatgctttttgcaatttaggatatcctgaaaagccaagctcaatcgcaaatcttacaactgttgattcagaaactccaacagatattcctagtttggctgccgtcataaatgctgctttatcataattttttaatatgtactcagctattaatttctgacctttacttagccttataaattttccctgaattaatctcattaaatctttactgttttcattatttacttcatccatcttttgccttcctgttacaacattgaataatattatcttaattctatcatcttatttctaaatattcaacaaataacttgtttttcacagagcatattaaaattttgcaatattttatcaagctactttcattacgtattatattttaaaatcaatatcttactttaatttattaatgatgtacaatcaaatttcctttatctgtcattatgattagttattttctataaactattaatataatctagttcttctttgtttaactttctatattcccctctttttaaatatcctagttttatttcccctatagatattctttttaaagataatacatcatggtgtatagcagcacacatttttcttatttgtctgttctttccctcatgaataccaatctcaatagtcgaaacgcctttatcataactaataactttaagctcagctggagcagtaatataccctccaatatctatacctatttcaaacttcatcttatctttatcagttatctctcccttaactaccgccacatacctttttattatttctacccttggatggattattttattgtaaatttccccatcatttgttaataacaataatcctgagctatcataatctaatctgccaattggatatattctctcattcaccttaactatatccaaaatagtatctctgcctttttcgtctttaaccgagctaatatatccctcaggcttattgagcattatataaactttatcttctttcttttttatttcctttccatcatattctatcatatcttttaatggatctacttttattcctacttcattaactataaccccatttactttaacttttcctgaaattattaattcctcacattttcttcttgaagctactccacaatttgcgagatatttctgcaatctttcttccataatttaaatcactccatttagcatataaatacatttatacttttacattttagattatatctttttcacttatataatacaactttctaattatttttatttgaatataaagtaatagaaacgctgtcaccagcgtttctattatctaattataaggctacttttaaattgtactccttatgattaatcaaattaccagagaaatcctccgcaacctgctccgccaccaaggaataaaattaataaaatccaaagccagcttccgcagccaccaaagccacctccgcagcccaagccgccgccaccaaagccgccgtagcctccaaatccaccaccgtatccaccgtatcctccgcagccgccgccgcatccacaaacattacagcaactaggtttgcaagagcaacaagaattacatttacagcagcaacaatcattagaatgtttagacatgttgatcatctcctattcttttgttaatatattctattcgatacatatattttttgttctttatgatttaaataaaatatgagaaccatctacaagtatccttactgcatatgattctcactaaattaaaatttataaatattctgtttatcaaaactttttttatcacctaaactatattttttaatattctttttattactttataggctataaatccaattaaaagcatgcatattatatctaatccaagaccctttattaagtctgatcctattaataccatagaatttccattcttccgctgcaaactatgaataaaactttcagttaaaaacaatgatgcaaatgatccagccgctgttgatactaatatcagtaaaatcttttcattattttgtgatgaaaatatcttattagcgttttctagtttatacttattttgaactacactgtaaacaatgatcataattataataataaataaaataattactgtttcaatccacaaatttctgattattatatctttaacgctaatcctatcaaatacaagctcaaaaaaacctcttcttaatttaccgttataatctaaccctattattttatccaataaactataattcttattaactccaaaatatacaagtatcgaaccaactttaactattactataaaaatagatgcaggtattatcgaaatcatactaataaaccctattactgaattagaaaacatcaaatctattattaacataaacattataccaataattccaagtaagattatttttgaagtttctataataactatgttccaatatccttcaacaacggatataaattcaacattaccgaaatatgatactgttgcaatataaacataagtcattacaaaaagtattaatgtaattaaaaggcatatgaattcattatatctaatctgctttttagtatatggtccactgcataaaaacatttcagtatttctcttattaattccctttgctataaaatatatggctacaaatataattgataacataaaatattcattacaaacattcgtataatagtaattatcaaaattgtttgcaagtcgatttctaacatcatttaaattgctctttataatttcatatgctacagcgccccatactaatagtcctatagctatagcagctttagcagaattgaaccatgcatataacaatcctttatttaaatattttttcatcgttatcctccttatcaactttatagataaagatatcttctaggcttagatctatttcttcaataaataaaggtttaaacttttctaagctttttataaactcctcatcatattcatcagttattatagtaaatactctgccaactctactaattctaaatattcccttaagttttaaatcttcttcataaacaggctcatcaaaagccacttgtatcttttttatcttattcttcatattttccacagaattttcatatgtaactatgcctttatctaaaatagctacatcatcacaaattctctcaagctcatttaaatgatgagaacttattattatagttataccattttcaaaaacttcatctgcaaatatctttaataatttattctttagtattgcatctagtcctgatgttggctcatccaatattaaatattcagcatgaatagaaaaagctagcattatggaaagtctcatcttcattccttttgataattggaatatatatttattagtttgaactttaaaaattttatttaattcattaaatttcttttcatcaaaatttttatatgaatatttgtaatactttaatatttcgctaactttaaaatttgtttgcatgatattctcatcagctacatagccaatcttatttttgacgtctatattatcataaacatcttgcccatcataaaatacatttcctgatgtccctttataaattcctgttaagcatcttaaaagtgtagtttttcccacgccatttggtcctataattccaaatattttatttttatctattctaatatttatattttccaaaatttgtttcccatcaatctcaaaggataaattatttacttctatcattatcatccacccctaactcggaaaatatttgaagtgccaaccttataaattcttccttactaacgcccccataacttgcctcaagtataattttttttaattcatttgaaatgtgctccatttttttctgatcccccttaccttcataattagatgttataaaagttccttttccccttaaagtttcaattataccttctctttcaagttcaccataagctttgcttattgtattggggtttatcataagtattgatgccaactctctaactgatggtaatttctctcccatctttaaagctccttttagaataagttcctttatcccaagttctatttgttcataaataggagtactactcctaggatcaattctaagcattgtcattaccttctacataagaatgatacataatataatcaattactaaaccttccccctcatctacgaggactaagttaacttttagcttttgtggtctatcatctttttcttttagagatctgtaattatatgcatcaacaattaaacttactggttcttctcttgttatcggacgtcttttagaaaaattatttcggaatccatcatattcacttagcatttcatttttatccttttcattaagatcacatactttttctatgtttaccttcgaaaaattaaactcaaaattagttaacctttttcgttctgaaaaacattctttaaattcatttgtttcagttaactttccggtatcatcaattgcttttaactgcttatcatttagctgatctagaacttcatttatagtttcaaaatgcttctgcttttgataaatcttattattatccatcgcaagaaaagcagtaactataatgacaattccaaacataataattatcgttgattttttcataaacttccctcctaattgtattaagtgtactaactcatatagtacacttgaattataaaactcatttcttgctttttcaattaataattgtttaacatttcttaatttttccttaatatacataatgtaaccgaaaatattaataataaaaataactagagattttaacccctagttatttttactatgtacaaacaattttctaaatatcttttttcttctctccattagcatagattaataatgctgctacagcaaaaactacaggtcccgcaatcatagcaaatgtcgatttgtaatccccatggattgccggctcgataattgtaaagaaatttgcgaatccaaccactgccgtaactataactcctataaatatagcaaatgatttacttttcaatattataaaaggcttctctatattatctttttttctaaatgatatatacgcacttgataaaaataaatatggtatagtcattgcgacattagtcattaatactaacattgtgaaaaataattttgcactgcttcctcccatagaaacaaatagcaccataactgctactataatagtttgaataaacattgcatttattggcatctcgttttcatcaataacagccatctttcctggccaaagttttgctggcgttccttctattaactgtttaagtggagaatatgatagtgtaaaaaatgctcctgttaatgctaaaaacattgataatccaacaaacctagctacccaatttccaacttgtatagataacgaattacttaaccccattgaactgcccaaagtatatcctaaattattcataacaacatatgcaacgtttgccatattgatgttttcacctgaaagagtgcctgcccagtttgtaaatattccaatcaagaaaattccaagagaataaccaacagaaattatagctgctgccattaaaatccccttaggaaatgtcttctctggattttcagtttgatcgacaagtccactcacagcttcgataccaccatatgcaaataaagcaaagactaggaatgataaaactgaactaacattctgataagctggatttggtgaattaacaaaagacattgtagatgtaatttcctctctaaattgtcccttatttaatatagatattataattgcccctattatcaaaactatgtttagaagtgctaccgctattcctccaactgatgtaatcttagttattttgcttattcctctttttgatataagatatgttgcagatacccatataacaccaagtacccctaaaacctgagttgaattcaatccaagtattccccaatttgatgtagtatctattccaaatattgtatttgataatggaatccaaatagtagaacatatatttatcatccatactacataagaagaataccacatgaaaactcctacaaaggcaaacttagggcccacagacttctccatccatgagtatataccacctttttcatctttaaatgcagatccatattctgccatcatgaatgcaaatggtataaaatatgttatccctcctaatataaaccaaggaattgcaccataacccataagataaaaagatcttggcatattagcaaatccgaaaactgatgtaaagatcatcagaattagtgtaattaatgttaatttcttttgtttattattttctgccatttttgttactccttaattttaaatacttaacatattcaaatagaatgaatagtatttttatttattatttgcaattttgatgtacttttatgctatatttaaatatttaaatacattataaattcttaaagaataaaaaaactaattaaccacactctatttatactagagtgtggttaatagctatgacgactcatatttgtttatgcaataatatatgcaaataaaatatcttaatttatcgttaatttctatctggtacattagatggatcgtcaattagagtagtaaaaaaataatcgtgatcatgcccatcattgaatgatgtttgcccttgaactatatgaatatgcttatttcgtgaaatataaatcgctggaccagttgtaatgcaaactctatgattatgatcattaaatgtgtctgtgacttcttcgattctatgaacatgagatagtccaacccttattgctgggccagtagtaccagcaatacgatgattgtgttcttcacaattctcatcttcttcataatttgtgcttgatagaaattcatgattatgatccctatacctataataattatcaccaagttggtttcctctataatgacgaccataaacaatatcgcaattattattgttgctcatatctaattcctcctcagtttttatatactatatgttatgtacgatcatatgattggtgttaaaaagccgaacttatttcatctatctttctaattaactaaagtttaattaacgtcaacttatagaataaattttcctaacttatttaaattaatgcttaatgtacgtttctttataaaaataaaagacatgattttaaataccatgtcttttaaatctttataacttcctcttaattgtaataattattataataatttttggctaaaaacattatctaaatttactttttgtattctttttgtaatttcatctacatctattgtatacagacctaattctttcatcctattaaaatatactgaacctgcgaaagtatatctatcttttcttccttctctagtactcgccttttcattcgcgtaagttatcatatctccgattgctatagatgaaggaagtatcaaaagcggcattcccatagccaatcttaccgcattgtgtccagctaaagcaccagtacacattgcttccgtatgaccaacaaataatccacttttctcacctgcacagaacaaattatctacgccaattacctttaagtcattagttcttggtgcaactgataaatacctaattgagtttcctttacttcctgcgtatggatcaacatatttagcattttctaatccttttattttccttagtttgtataacggatagtaagttgtcattagctttgcatgtcccgtatccaagagtatgatattctcagcaaattctttgagcgcatattgttggcatacttttgtacttaatttatcataatttatatcttccttaggaacttttaaaactacaacacctttagaatctaactcatttcttatttcatctgacaaactttctttagccaatttacaagaaccagagaacgcccctaagatatcatctcctctttctccttgaatatcggaaactccacatctttcactaatactaattctaggcccaaaagcaggacatcttaaaacacacattgagcagccatttccataacgcaagcaatttcccataggcccggtagttcctgttgtctctataaatacgtcaccttctatataagttccatcgctaagataagcaccttttattttttgtccatcaaaatttatgtcattaactctgctctccatcattagatttatatctaatgatttcaaatatttgctaacaactccctctattaaattaacattataaagtgtagcatgtttatgtcctggaaaatctatatttttatgagttgaaatttcatctgtgatcttaatcagatctcctccgccaagagctattaattcttctgcagcagtatatctaccattattacgcattattccacctacattaccaagtccaagtaacaaatctgtcttttcgattatagtaacatctgctccagcttttttactcgaaattgctgccgcgcatccagaccaacctccgccaacaataataaccttcatataaatcttctcccttcaaaaatacttctcgggtcagcctgttctttgcagaatctttttactctgtgacctgaaaatcttgatgtacatgctccacaaattccttcaccgcagcacatcttaaaattattacaacatgaaagtgagacatcatttctattaatgtcgcttaaataattaataacaccataagtcaagatatcggctcctgctacatgaatataattagttccatttttaagcgaatccttaatcaatacttttgcatgatctgagagcttgcccgtatccagtagtgaacattctgatacctctattttatattcagataaaatttcttcagaaaaattttcctcaaatggatctttatcgattattatttgtatatcattattttgtgaaattaactttcttactacaggtatcataggagctaatccaatacctcttgcaagtactaatgcttcattattcttttgggccaatatatttttaattccaaaaacaccattccagtaaggtccacgtattactatgttcccgcctgttttaatatctaataatttagcagttttaacccctctaatttcaacagcaaccatgataatgtcactttctatatctgaattcattatagatatcggaacatcgaaataagtatttccatcagttcttataaatatataacttccaggcttcaccaaatctataactaatttatgaggagctttaaatttaattatcactaattcatcattataatttagtacctctgtcacattacattcaaaagttttacgcccttcttttgctttatttccattattatggagttcttgatatatacaaacccccttccaattcaaacaatcacaaaaaacttctccttggcattgggaacatgtcaaacactgcccatactctgcaagtttacatggacaatactccgttcccgcatctatacaatcaatagcttcttttaccattttttctcctttagataaaattgcttctaatataaattattttaaaatatctaatttgacacaaatataattgtttaaaattatttattttccaatattctaatctataccttatactctaatgatttatttttgattttctaaatattttatttaataataaaaaaagtagatagtaataaaaaactatctactattgcttactaaaccaattctttaactgtatgattcccaaatgctactttctctaatacataattatatattttttctgtcacattccatctatctggacaatttaaaactacaattatcacatctttgccattattattaattgatgaaactaaacacttaccagcttggcctgtatatcctgttttaacaccattagctcctggaattctccacaatattttatttatgttattataatctcttgtaaaattatacttttcttttgagatttgtttacttcctactacttctctaaatagatcataatccatgcccttagcagtaagtatcgctaaatcatatgctgaagaatagtgtttactactatccaatccatgaggagactcaaaatgtgaatctaatattcctatgcccctagcataatgattcattatttccgcaaatccttctattgatccccctaattcctcggcaatagctattgctgcatcatttcccgacttaaacattaatccaaaaactaactccctcaaagtaatttcttcgttttctttatatccaactgtagaccctcttatactagctgcttttttacttattactacttttttatctagattaccttgttcaatagctattaaagaagtaagtatctttgttgtacttgccattggaactatttcataagcattttgttcaaataaaactgcatgactttccttatccaatgcaatcgcagatctagcatttacccttaaattattacctttacctttggcatttgcatctatacatattatttgagtacatataagaattagtgctatcaatgaagtgcatttactagtaccttttcgcataattaatcaccttctaaacttactatttggttctagtttacctttaaaattaatttttaaacctaattttgataattttctaggtttatttttttattattagtcaataattatggagtagatgtagtttggaggaattttatgaaattattttatgtctttttagtggtcttattaatattttttattcctattcccattaaatttagtatttactattctaccgtagattattatataaaattatatggatttaatc

SEQ ID NO: 94 - DNA, 23728 bp, Clostridium beijerinckii
ccataaacatccctccaattatactgaaattaattgtaacaaaaaaagaccctgtaaaatagagtcagtaagaaatttagctttataagccttttttctaactgtccattctataggatccattttactcattcttaggcctttttttgatatttaacaatgtgcttgtccagattttgagaaatacggataactattttatttctaggagaaagaatacaaagcatattatttaggagacattttcttaaacgtatattatatcttaacttaaataattcaaatctattcatgatagtacctctttttactaatttatacacataaaataaattataatctacataaaataaattttcaaaaaaaatcatactacaaataatgtcaaaatattgtataaatatacatgctgttttattcagataaaatgagtagtttaatttagttagatgatatataaagagatattaaattactggaaaatataaaattgtatattaatatacatattatttaaaatagttaggaaccaaaaaacttagtttatttactttgtatctcaaactaaatataagttcgaatgtaactagaactagttataaaactataaagattattatttaaaacttatgaaggatatttttatgaccttgatagatatatagatataatttaaaaaatattagcattgaaaaattgatgaaacagatgttaaaatgtatagatgaattaaaaaagaaagtattcacttgtgaggaaataattcgaattaaaaatcactaaaagatatatagtaatttattggaggtaattatcatgaacattcatgaaattttgtttggttcaagaccaaaatctattttgaaaataataaaagaaggggatttggaggaacttaaaaattttataacaaatggcggagatattaatgaaaaatataatgatactagcctgcttcattttgctatagataattgtgagaaaaattactttgacataatacaatttctagtaaacaatggtgctgatataaatagtaatcaaagttatttgaaagaactaccattacatagaatctgtgcgagagtaagtcctaagatggacgtaattaaattactgttagagaagggatctaaagtaaatactgaaaatatatcaggaaaaactcctatcttttattgtaactttaattattcggtagagcttttaaatcttcttataaaatatggtgcagatattaaacatagagataagtatagcaatactcttttgcatgatgactatttaacttgtcgtgatactgataagtttgaagaatacttaaacgaaatagtttctcttggactagatataaactcaaagaataatttaggtcacacaccgctatatctttgtaaaaataaatctattgaaaatatattgatggagcatggagcaaagagaagtgtataattaagtgcttagatactatagagtagttaaacttagttatataattttagaatcttttttatgataatattactaccgagtataatttataattgtggttaacatattactgcaaaataaaattatgattaaggaggtagattcaaatgtcattaaataatagcggagtgcataaaaattcactatccaaaaaaagaactgactcaaatacggtaaagtcagatgttggtgcagaaattggttttcctaataacaaagataaaggtagagggaaaacagatggaatagttggaaagaattgaaatttaaaatagttttaattcttagattgaaataataatttagaatataagaaaaaataaggaatccctttgcagtaatagtttttatagcaaagggattcttttattagtttcttattagatagtcaaatgcacctaaggcagctgttgctcctgatcccatggaaataattatttgcttgtatggggtattagtgcaatctcctgcagcaaatactcctggtacattagtagcaccatagttatcaattataatttcgcctgacttattacgatcgactgtttctcctaaccaatcagtatttggcacaagtccaatttggacaaatacaccatctaattcaacatgcttaatttctcctgtgtcacgttcaatataggtaattccatttaccttatcagttccagtaatttctttagtctgaacattttttaagacggttatattattcaaactgtaaagacgaccttgcaaaactgaatctgctttaagttctggcataaattcaaaaacagttacgtgactagcaactccagcaaggtcaatggcagcttcgatgcctgaattacctccaccgatgactgcaacatgtttccctttaaataaagggccatcacagtgaggacaatatgtcacacctttattcttaaactcttcttctccaggaacaccgacattcctccagcgggcacctgtcgaaattattaccgttttactctttaaacgtgcaccattttctagttcaatctcaataaggtcttttttttctatagtcttagcacgttgtaagtttactatatcaacgttatagtctttgacatgctcttcaaggcttgctgcaagtttagggccttctgtatatttaatacttataaagttttcaatacctatagtatctaatacttgaccaccaaaacgttcaacgataattccagtacgaatgcctttacgagctgcataaatagcagcacttgcacctgcaggaccgccgccaacaacaagcacatcgtatggatctttatctgcaaaattttctgaaactggggcttctccgatttttgcaagaatttcttcgacagtcatgcggccacttgcaaagaattctccatttaaataaactgatggtactgcaagtatatttttactttctatctcttctttaaaaacggcaccatcaatcattgtatgagtcacctttggattaaggatgctaattaaatttagagattgaacaacttctgggcagttatgacagcttaaactaatataagtttcaaaatggtattctcccttaatgttcttaattgaatcaattgttttctgatcaatttttggggctcttccgctaacttgtagaagagctagtactaatgaattaaattcatgtcctaaagggattcctgcaaaagctacaccagtttcttcatcagtacgatttatgctaaagctaggagttcttaataattttgatttttcagcttttatttttggagacatagaaactagttcatctacgagagaaaccatagtgttggatatatcatcggaatcagcactgacttttataagtacagtgccttccataagctcaagatattgagctaattgttgttttatatctttatctagtatcataggcgtacctcttagatctttcctacaagatcaaggcttggtttaagtgttgatgcgccttctttccactttgctgggcaaacttcaccaggattatttctaacatattgagcagctttaattttatttactattacagctgcatcacgacctatattgccagcattaatttcaattgcttgaataacaccatctggatctatgataaaagtaccacgatctgcaagaccatcagattcaatcaatacatcaaagttgcgagataatgtatgtgaaggatcaccaatcatagtataagttatttttttgatggcttctgaactatcgtgccatgctttatgtgtgtagtgtgtatctgttgaaactgaatatacttcagcaccaagcccctttaaagtttcataattatcttgtaaatcttctaattcagtagggcatacgaatgtgaaatctgctggataaaaacaaactacactccatttgcctttgaaattttcttcagtgatatctataaattcaccgtttttgtaagctgatgctttaaattgttttacttctgttcctattaatgacataatatattacctcctaaaattcatttttatatttaaactatatttatattttattaaatattattatttaataatgataatgattatcacttaagataattataaatctaaattataatttgtcaataccattatgtaaaaattcttttagtaatatttttacttgagttttctaaaatttaaaggtgcttttccatatgttttcttaaacattttagcaaaattagcagagtaattgtatccaaccttatatgctatctcctcgatacttaaatctgttgttgataaaagatttgcagcaataatcattctaatatgatttgtatattcaccaatcgacatatgataatattttgaaaatcctgcctttaatttttgctcatttaaaaagaccatcttacttaagctatttatatttggaggattatgataatttttagataaaatatcatgagctttttgaatagcacgaatatcaaaagaggttaatcttactattctattattaccaatattaatgtttccatagtcaatctgattagtaaaagcattctcaggagatttattgacctcgtttattaaaatagcaatacattctaatattttactttccaagtaaatactatttaataagtttttattagctaagctttgtagttgacggataatttctgtaatttctagaggcagatagatatatgtataatttctaataaaagaatcaaaatcgatcgcattagaaaaattaggttttataatttcggtgaaatatttttcatgtatagttatttcagttccatgataatgctgaccttttgcccatttttgttttccttttaaatctttttctacaacaaagaatgaagaaggcgtaaaagaggatacaggattattttcaagctgaaattctgtaactcccttataaactaatccaaaacgcattagtagctcagggttagaaaaggataagaaaaagtctttaggaatagtataatccgcaatacctaaactataatatccatcccttgaataaataatgcaatgaccaaattcgggtctatccttatttgtatataaagtataattttcattttcaattttactaaaattcaatttttttaagactgcggctttaaactcatcactagattttacaatcataaaatgctcctttaatttttatattattagacatatgatatagatactcaaaacaagaaaatgattagttaagatgtaaaactaattaaattagatgtgaatattgcattgagaatgaatatcatctacaattgctttggttaagaataaattctaaactaattataaaatgttgtaaagtatattttagaaaagttagaagtcggagggaattatgaaaagaagaacaaataaaattaaatcagttttagctttagcagcaattgtgtcagtgacgggttcaatgcgagttaaggcagagacttatcctagaataccatcagaagaaggaactatttatgaagcagcggcttataaagacggtaagttttatattaagggagagacaaaagaggctgaaaatgaaggggcatattatttaaatggagataagtatactgaaattaatgatatagatattgaaagagaagtttatagaacatacttagataaatatattgagatgaactatggagattactatttggacatgtcaaatggtgagttgtcggaaaacagcttaatagaggatgatgtagataatgcatacttggcgttatcaagaaagataagaaaaaacactaaaggaagatattcagatactagtttgaaaaacgatttagttgaaatccctaatgccaaattcggaaaaagctggtattttactaattatgatggttataatatttacacagattcagaaggaaattatatagatgcggattacaatttaggtaaaattaagattgcaacgacatcgagcaatattattacattaacaaatacaattgataaaaaagaaggaaccagagcatacgtttcagagtcaaatgtactcggacaagatgcagattatatatatagaactgcaaaggttactattgaaagtgatgaaataataagtaaaatagatgggattgatgtaaatgctggaaatgcatttgatacaagtgaaaatgatggtaaaacagtaagttttctagctatacaaaagatttcaaaagagcaggctgaagataagatagatggtgctaactatgctaaaaatacagttacatatatactttctggtacagatggaacatctgtaagtctacttgatggggcccaaataagtgtggcaggaggatatatagttgagtatataaaagattcaggaacaataacaattcaaactatttcattatatgaagagcgaggaaatcaaaattatgtatatgcttataatattgcggcagaagaaataaaaaatatagatatcgatacgaatggaaacctatggaaggttgaaaatggaattgtatataaatttgataattacagtgaatgggataagatttataaggtagatggatctatggataatttatcggtttatgatgaaaatcatatgataatttggagtgaagatgttgatgtttactcaataaaatcagaggatacagaagagataaaggtagaaggatatgggccagaagagattttagcaaaaaaattaggatggataatgaatacagatggaagctggagttataataagccagagtatattaaagctactggatggctttacgacgagaataaatggtattatttaaattcttttggaataatgcagacaggatggattaatgaaaatagcaaatggtaccatttaagcgaaaacggagcgatgaaaactggatggctaaatgagagtggaaaatggtattatttaaatacatcaggagaaatgctttatgatactacggttgatggatataaactggggattaatggggatttgattcaataatttttaatatgtttcaggcttaagtgattgatattataaagttatttaattcatatataagccaaaaataatcaattaaggtgcaaaaataattaaatctggtgcaaatattgaaatgagaatgaatgtcatatacaattgtttttgtcggaaataataaagcggaacttaattcagatagaatatgatctatgtataaatttaagttggattttcatagtagctagatagtggaaaaaatataaattatgaaaggaagatacaaaatgaagaaaatttcagtggctaagaaacttttagcagtttgcttaacgtcaatgatatttgttgggtgtacaaatacaagcaattctacagtaaaagaggagaataaaactgttaaagtaactgatgttaaaggagaaattgaaattccagcaaatcctcaaagaatagttgatttaagtggtaagagtgatgttttatcaattttaggatataaagtaataggaacagctaatagtgatgcttataattataaaaaattacctacatatttagaagatacattaaaggatgcaacaatagtaggttatagcatgcaggacactatggacattgaagcaataatgaatttaaatcctgacttaataataatttcaacagtacaggaaaaaatgtataatcagttaaaagaaattgcaccaacagttatgattaaatcagaagcattaaattggaaggaagatgttaagaatttagcaaaagtttttgataaagaagatatagcaaatgattggatagaaaattatgataaaaaagcaaaagaagcaggagataagattaaggaaactcaggggaaagatgcaacttatttatccttcttagctagcggtggtcaattctatgtatttgatggagctggatttggaaatgtattatatgaagatatgggtttaaataaaccagaaggtatgccagagcagactgatataagcttaccagttgtaacatatgaaggacttgcagcaataaaagcagataatatattcgttcttgcaactgatgaagactcaaaaactcttgaaggaaatgcaatatggaatggacttccagcagtaaagaatggcaaggttgttaaattaccatcctcaccttattttaatcaaggctatagtccaataggaagagaaaaacttttagatgaaatagtggagaagttaaatgaaaagaaataataaaaatgcaatgacttttacagtttgtagtatttttattctgatagtgggtctaatcctaggcgtaagcctaggagctacccagattggaatttctgaaatatggcatagtatttttaactatagtgaacagcttgaacttgtacttattagagatgtacgtattcctagagttctatgtgtattatttacaggagggattttgggtgtaacaggagccattattcagggagtaacaagaaatccaatagcagaaccatcgcttcttggtgtaagccagggagctactttggttattgcaatattttatgctatgggaatttcaataaatactacaaatgttatgatagcagccttaattggttcaatatttagtggaattatagtaataggttttatatcaaaaaaagcaaataatagttcaattacaaaaatacttttagcaggaactgctataagtaccttttttatttctcttacaactattgtagggttattatcaaaccaatctcaacttcttgctttctgggtagctggaggttttcgaaatgcaacctggttagattttaaattagtttcagtgattgcaactataggtttaataattgcacttttactttcaaaaaagataaatatattaagtcttggagatgatgttgcaataagccttgggcaaaatcctgagaaaataagattaataactttacttgttatgataccaatgtgtgcaggtgcagttgctgttggtaaaaatattggttttgttggacttattgtgcctcagattgtaagaaaaattttaggagaagattataggataaacataccttgttcttttttacttggagcagttcttttaacttatgctgatattgctgcaagaatgtttttaagtccttatgaaactccaattggaatattcacagccttaataggagttccattctttatagctgtagcaagaaaggagaaaggctgatatgaaaaagaaaagttttaaaataacagcttcaatattagcagccttgctgtttatatctttaatattatatttgagctggggtacttataaaatatcacctttagatattataaatacgctccttggaggcggaactaaactacagaaggcagcacttttaaacaccaggcttccaagacttttagttggaatttcagtaggcatagccttatctacagctggagcgctccttcagacaataacaaaaaatgaattagctgattcagggataataggtattaatgctggagcagcagtggcagcagttatttttatttctttaaaaactgaggattattatagtgagcttggtgctttatctatttatgtgctgccttttatggctattttaggtgcaggaatttcagcaattatactctactttttatcaagcagagatagagtaaggccaaagagactgcttcttataggacttggaataaatgcaggattaagtgcttttataacttttttcacttttagaggtggagctggtgattataacagagtgctaatctggacctctggaagtctctggggttcaggctgggattatgcaaaaataataattccattagttattataatgtttactctagtaatcatgaattataagaaattagatgttcttaatttatcagatgaacatggagtctgtcttggattaaatttaaataaggagagaaaaaaattcttaactattgccgttattcttgctggagcagctacagcctttgccggcaatattggatttataggcttaatatgtcctcatatagcgagaaggttagttggaccttatcataaaaactttcttgtaatatctgcaattataagtgcagtaataatcttacttgcagatgcagtttcaagaaatttattttctccaattgaaatacctgttgggattacaatatcaatttttggagtgccatattttatttatttaatgatgaaggagaattagatggaagcgattagtgtaaaaaatttatccgtagcctatgaagataatttaataatagataatatgaacctttcgattccaaagggagaaataagtataatcataggagccaatggatgtggaaaatcaactctgcttaagactataggtagaataataaaaccaaagaacggtgaaatttttgtaaatgaaaagaatataaaaaaacaaaaggaaaaagaaatagcaactcaggttgccttcttgcctcaggggccaacatgtccaagtggaattactgttaaagaattagttgcctacggaagatttccacatcaaaagatgattggaggcctaaatagccacgacaaggaaatcatagattgggcaatagaagagacaggtcttaaagagtttgcagacagggaaatagataatctatctggaggccagaggcagagagcatggattgcaatgaccttggctcaggaaacagatataatcatgttagatgagcctacaacttatttagatatgtcttaccagcttgaagtattagaggtattagagagattaaacaaaaagaataatattactgtggttatagtccttcatgaattaaataatgcctgcagatttgcaagtaatatcattggactgaagcaaggaaaaatcatatgcaagggtattcctagggaagttataacacaagaaaacttaagaaaaatctacggaatagatgttaaattacaattaagtgaaaatggtgagtatccaatctgcgtagaatatgaacttaggcacatgaaagaaaataataaaccaaagatgtgctgaatatttcgtgtcagacaaggaagtagattagcctaatagccaagccctattggggcaatctgctgacgcagtatgacgcgaaataggcaagcatattggtctattatttttttgattgtgccgtgaaagaggataacatgagaaataagaactttattataattgttattggtcagataatatctctatttggaaatgcaattcagagattttgtatgtctttatacattttaaatttaacaggaagtgctggagttttttcaaccatattagcaatatcaactattccatatgttttatttgcaccaattgcaggcttccttgcggatacagtaaacaggaaaaaaataatggtttatcttgattttgtaagtagtgtattaatgggcgcctatggaataatacttatgagtggaagagataataccataatagtaggtattgtaatgtttatgttaagtgttatttatactttatacagtccagccgttacagcctctattcctcaaattatagaaaaggaaaaattaccttcagctaatggaataattcagcaggttggatatgtagttaatttgcttggaccagtacttggagggattttatatagttttattggaataaagctggttgtaataataaatgctataagctttttaatatgcgcaatcttagagttatttttaaatattcctgatttggaaataagggagaaatttaaaaatcctatcttaaaatcaataaaggaaatgaaaaagagttttatatatttaaaggaaagaaagacaatcgtcttaggaatcatagtttcttatgctctgactaatatttttgtggtgccgattttaagtgttgtgactccatattttattaatatacaaatgagtctgccttccagtatgtatggttttatagaagctatatttgttgcaggcatgataataggaggcatggcaataacctttaggcctaaattatttagtgtgaaaaaattacataagaccatgtatcctatggtaattgctctaataattatgggaatagctgtatacttaaatgctgaaaataaattctttattttagggctttattcatttggaggttttggaataatgttatctttggctttatctaatattatatctttaaactatattcaacaggaagtaaggggagatatgcttggaaaggtcagtgctttttctacagcagtagctacagtaagcgtgccccctggacaactgatttttggacaattaatagattttaattttagcctttttagcatcgttattctgagtactatttctagcgttggagtagtgtattttataaaatggaatgtaagaaaagcttaaaaataaataactaatctttaacgtatattgatgtaagtaaattaaattatagagtatagttagagaatatttaacaatgattgagacgttataaatattaattaaaagctggggcgctcttatataagaaagcctcagctttatttatttcatattctaatgagataatcaagtagactaaaaaattatattgtgtgattagtaaagttaccactgaattattgggataactgatgaactttataaagctgtttttgaataatcagcgagtttgctgttgttttaaacttttttaaaaagtaatcaagtccgatattaaaaatttacgtattttcgaacaggtctaaaaaattctttccagatgatgaaaggtaccctgtttttgaccatattatagctatctgagttgttaatatgtcactatcaatttctttgtaaattatacttgaagaacctattaattttattgcagattttggtactatggcgattccaagtccagaattcgcccaaagcagggaagttcgtgcatcatcatttttgcaaaatacagttggctgaaaattaaaatcttggcatactttaaatatgagactttcaaatcgtctatagaatatcaagggtttattatttaattcagtaatgtttatgatttcactatcagtccagtttaagtcttttctcatagctgcaaccataggctcttttggtaaaaaaattgagtttattcccgaattgttaaatggagttcttacaatagcgatttcaattatacctttatccaataactctaataattcataggtattcccttcatgaatttcaaaatttatgaaagggtatttttcgtgaaatatatttaacctgctatctaaaagtgacgctccagatgaagatacagtgcctatggataaggtcccgtgatttccttgtttaaaatcttttaattcattttcagtagattttgttaaagataatatctgcttagcgcgcttataaagtataactccagcatcggtaagttttatatttcgacttcctcgttcaacaagtttaacgccgagttcatcttctaagtttttcaactgatagcttaaagggggttgagccatatgaagtcttttggctgcatttgttatttgaccttcttctgcgattgcatagaaatattttaattgtttaatatccattttttatccaccttctgatatacaaaaaatatatggcatcgatacatattatgtattttttatatagatatgtttttgttataatgataaaggaaattttgaaaatgttcaataagacattacagatagggggataaatcttgaactatttattaaaattcgtaaaaccgtataaaaggcaagttacattaggtcctatatttaagttgcttgaagctgtctttgaaatatcaataccaacaataatgatatttataacagataaaggaataggaacaaaaaacataaactatatatttgaaataggattaataatgctttctatggcaattttaggtgtgttatcatcttttacatgtcagtattttgcatctattgcttcacaagggtttgggacggctcttagaaatgagatgttcaaaaagataggaactttttcatataatgagattgatgattttgggacgccatctcttattaatcgtgttacaaatgatgtgaatcagcttcaacttggccttgcaatgcttataagacttgctataagggtgccgtttctttgcatcggcggaatcataatggctatgtatcttgacgtgaaattgtcgcttataatgtatttatcaattccattctttgcttttgcaatatatcttattatgaataaatctcttcctctatataaggtggttcaaagaaaacttgataagttgtcgcttattttaagagaaaatctatctggagtaagagttataagagcattttcaagagtagaaggtgaaaaagtaagatttagagaatcgaatgaggaacttgcaagcactgcaattaaggtaggaaaaatatctgcgcttatgaatccagttacaagtgtaataatgaattttgcacttatggcagtaatttggtttggcggaataagagtaaatgtaggtggaatgacaacaggacaggttatagcttatataaattatataaacatggtattatcggcgctcatagtacttgctagccttatagttacttttactaaagcagcagctagtgcagctcgtgtaaatgaggtacttagaacagaaccaagtattaagtacagtggaaattctgagtttagtaaaaatattaataaagatattccaataattaaatttgataatgtatctttttcttataaaggatctaaggaagatgcaataagtaatatttcttttgaaataaaaagaggacaaatggttgggataataggtggtacaggttcaggaaaaactactttagttaatttaatacctagattatatgatacaagcaaaggaaatgttttgctaaacggaattaatgttaaagattattataaaaaagaaattgataataatataggtctagttcctcaaaaagccgttttatttaccggcactgtatctgaaaatataagatggggtgctcaaaatgcaagtatgagtgaagttaagaaggcggctgaaattggaatggcagcagattttatagaaaaaatgcctgaaaaatatgacacatatatatcccaaggtggagttaatttctctggtggtcaaaaacaaagacttactatagcaagagcattagtaaagaaacctgaaatattaataatggatgacagcttaagtgctcttgattatgctacagatgctgcacttagaaaagctcttaaagaaaattccagtgatacaactgtaattatggtaactcaaagaataagcactgtaaaggatgctgatttaataattgtattagatgacggaaaactcgcgggagttggaaaccatgaacaattgcttaaagaatccgaagtttatagagaaatatgtagctctcaagttacaaaggaggctatgtaaatgaaaaaaagtacattttctagattgattggttatgtttcaaaatataaaggatatatgtttgcatctctgatatttgcgctaataagtaatatacttatagcatttatgccgttaatagtgggaaggtctattgatcatatagttgctaaaggtgaagttgattttgatgggttgattaagacaattataatacttggagtaatatatgtaataagtgcactatttacgtggctatttactatagtagctaatactgtagcatataacacagtaaaggatcttagaaatgaagccttaaataagataagctctctgcctttaaagtactttgataaaaatcctcatggagatattataagcagacttacaaatgatatggataatatttcagatggattatttcaagggataacacaattttatccaggaatcataactataataagttcacttgttttaatggtaagtttaagttttaaattaactttagttatagttttaatgacacctttttgttttcttattgcttcttttattacaaagagatcaaataaaatgtttaaagagcagcaaaagactttaggtgaattaaatggttatatagaagaaatcgtgggaagccaaaaagtagtaagactttttggatatgaagaaagagctcaggagagcttttcaggaattaattcaaggctttacaagtgtgggcagcttgcgcagttttattcatcacttacaaatccagctacaagatttgtaaataatattacatatattttagttggccttgttggagggatactttcggttttaagcgggttaagtgttggtgtgatttcaagttttttaacctattcaactcagttttcacaaccaataaacaacattactagtgtagctactcagcttcaagcagctattgcatcttgtgaaagaatattttctattatagatgaagagccagaaaaagcagattctaaagaagctgaaaatatagagagctgtgatggaaatgtcgagtttgataatgtatcattttcttataataagaaagttccacttatagaaaatttcagcgttaatataaaaaaaggaagcacaatagctattgtaggaccaactggtgctggcaaaaccactatagttaacttacttatgaggttctatgatttagacaaaggtaggattactatagatggcaagagtataaatgatcttacaagaaataatctcagaagccaatttggtatggtgcttcaagatacatggctatttgaaggaactataaggcaaaatattgcttatggtaaaccaaatgctactttagaagaagttgaaaatgcagctaaagctgcctttattcatagttttataaaaagacttcctgatggttacgatacgattataactgaatctggaggaaatctttctgaaggtcaaaagcagcttttgactatagccagagtaatgttaattgatccgccaatgctcatattagatgaagcaacaagtaatgtagatacaagaactgagctaaaaatacaaaatgcatttctttcaatgatgaaaggacgtacaagctttgttatagctcatagactttctactatacgtgatgcagatataatccttgttatgaagaatggtaaaattgctgaaagagggaatcatgaggagcttgtaaataaaggcggaatttatacagaactttataacagtcagtttaagcatcagctgtaaaaagatgtttatatatttaaaaaaatttatatgttagtataaattgtataggtaatatcatatttaataatatagcttttttatcatgagtctcttaaggctatagaggatcataaatttttaaatgtataagaggtagaaaaatgaaacgtaataatagtaatagcactaaaaatattaagagagcgagaattactatattaattgttgcagttgcattacttgtaattataggaagcatagtagcagtacagaaattttcagcaggcagtaagacggtacaagctgctagcaacacgggagaaagtattaatgatgataaagaaaatagcgattcagttaataaggaaagcaatggcaacgtagaagatgttgcatatttagaaaagtatattgagcagcaagagaagaaccaaaagcctgatggagctgatggtaaaaaagttgcttacttaactttcgatgatggcccatcgacaacagttacccctcaaattttagatatccttaaatctgaagatgtacatgcaacatttttccttataggaaagtatgttgataaagatgatgcaagcaagaacctagtaaagagggaagtagcagaaggtaatgcaataggcatacattcatattcacatgactatggttacttatttccaaagggtaaaataaacttggagaattgtatgtctgattttgataaaacagataaagctttaaaaaacgttttaggcgaagatttttcaacacgatcaattaggtttccaggtggacaagaaacatggagtaaaaaggatcctcaaggagcagaaaaagtggacaaagccctacatgagaaggattggcatcaaattgattggaatgcattatcaggagatgcagaaggtactcataaaaagaatgcagatgaactaactcaggaagctataaaaagtattggtaatagagaaaaggcactgattttaatgcatgatacttatggaaaagaagaaacagcgaaggctttaccaagaataatagaatatttaaaacagcaaggctatgaatttaaaataatagaataattaattattatctccctcttatttataaaataagggggagactttttgttctctaggactttatgttcagattaaacatgtggacattgtaccacttgagagtataagttatggaaacactgattcagaaagttaaggttcattaagccaatcgaaaattaaaaatatgaatgatttttatcacttatatttttaattttaagttatagtattatttaaagtgcattatttaaagtgtattgtataaatagccaatgaattaagagattgggtggcaaaatttagctttcatttatacctgcgttagtataatatgtaaattgataaaatgaaatttatacaattgagttaaaggttattgaaaatgtaaaattgtattttaaaataatatatatattattttgcaaaactaattcttcatcataattctaaaaatattgcaagaattttagccgtaattgtgaattgtgaaatgtgcattgtgaattgcaacatatatatgttaaagaactaagattaggagtgaagaattttgatacttagcaaagaagtggttataaggcacagtaaaggattgcatgcaagagtcttggctatggttgttcataaggtaagcgaacttgaaaagagacatgatttaaagttttttataatttataaagataaaaagaaaattttagctacaagtcttatgccactggttttattgaaggtaaagcagaatgagaaaattatagtagaagttcatggagaagatccaaaagaaccgctagatgaattatgcgattttctacaaagtgattttgatttagaagataaaagtactattaatcaagttgataacataataaataataatactataacgttggagcacgtattcagtaatatacctaatggaatcattgccacagatgagaaagatataatttcaatattcaatgaggaagcagaaaggttattagggatatcttccggagatgctattggaaaaaaggtatatgaaataatagaattcacaaatcttcatgaaataaatagaactggcaaatcggaattaatggtaaaagaaataataaataatagaatattgcttataaatagaactccaataataatagacaagaaacctaaaggtgcattagcagtatttaatgatatatcaaaattagaaaaagttaaagatgaacttaaaacggtgaaagatttgaaagagaggctacagcttatattagaaacagtacaagatggtatatgtgttataaattcagatggatatataacatacgtaaataaggcgtatcttagaattttgaacgaaaaagaagaggatatattaaataaaaatattagagatgtatctccagagggtgcaagaattaaagtacttaaaacaggagaaagcatcataggggcaatcagctataaggaaaatggtgtaataatagtttcaaatgtaaaccctatagtgattgatggagaaataacaggtgttgtgtccatagttaaaaatgtaacagaagttcaaaaactttctgagaaactaactcaggtctctgcaaaagctgattatctagaagaagagcttattagaactaagaaacctgattcagctttttcgaagtatataggtcatagtgggaagatattagatgcacttgctacaacattaaaagcagcgaaaacagataccaccgtattaataagaggagaaagtgggacaggaaaagaattaattgcagaaggaatacatttttcaagtaagaattccaaaggaccttttattagagtaaattgtgcagcaataccacaaaacttattagaaagcgaactttttggatatgaaaaaggagcttttacaggagctataaaaagaaaattaggtaaatttgaattggctcaaaatggtactatacttctagatgaaataggagaaatggataagagtatgcaggctaaagttttgagagtaattcaagaaaaagaatttcaaagaattggtggagaagaaactataaaaataaatgttagaataattgctgcgactcacagaaatttagaagaaatggtaaagtcaatggagtttagagaagatttatattataggttaaatgtaattccaatatttttgccgcctttaagagaaagaaagcaagatatagcgcctttattagagcacttcatagataaaataggtaagaggataaataaaagaataactatagtaacaaatgatgcaatggaatctctattagaatacaaatggccaggaaatataagggagttagagaatctggtagagagaataatggctttaaatgaaacagaagtaatagaattaagtgatcttccagcttatatgagaaaagatataaatacagttaaaaatgcaatcaaaagtaaaaataataatgaaatagacatgcttattgaagcagaagaaatattaccactaaaggaatatgaaaaaattataatagaaaaagcacttaagaaatatggaagttataatgctgcgggaaaagcattaggacttactcataaaacagtagccgcgaaggcaagacaatatggaatagagaaaaaggtaacttgggaataaaaaatagcaagttggtaaaaagtatcatgataaaaaagaacaacttgatactttttaccaagagatatgctatttatattacaattttctgtaaatgtttacttaaactttaggctagaaggcttgaaaatacacacttttaagtatatttaattagtaattgaaattgtggcatgagtattgctctatataaaagtacaaatataaataaaaacaaatcgaaattatttacatatattctaaaaaatttaattcataaaagttatcttatattacttaggtaataaaggctaataattttataatgaatgaattatattatttagaacttatatatattgcaaaaataattcttcatcgcaattctaaaaatattaaaagaattttaactgtaattgtgaattgtgaaatgtgcattttgaattgcaacatatgtatataaattagatataaataattttaatcataaagaatatttaaatatgggaggaagaattttatgaaaaaaataattaatgatgcaaatctagtacttgaggatatgttgaaaggaatggtagctgcacatccggaatatataaaaaaattagaaaatgcagatgttttagtaagagtagattcaccaatagatggaaaggttgctttagtaagtggtggaggaagtggacatgagccagctcatggaggatatgtaggaaaaggaatgcttgatgcagcagtagcaggagcagtgtttacatcacctacaccagatcaagtatatgaagcaataaaagctgtagactcaggtaaaggagttttacttgtaattaaaaattatactggggatgttatgaactttgaaatggcaaaagatatggctgaaatggaagggattaatgtaaaagctgttgtagtaaacgatgatgttgcagttgaaaatagtacttatacagcaggacgaagagggattgcaggaacaatatttatacacaaaatagcaggcgctaaagctgaaacaggagctagtcttgaagaagttacaagagttgcagagaaagtaatatcaaatgttagaagtatgggaatggctatttcatcttgtattgtaccagctgctggtaaaccaaatttcacattaggagaaaatgagatggaaattggtatgggaattcatggagaaccaggaactcatagagaggaaataaaaacagcagatgaaattacagaacatttaatgagcaaaattctagaagatatcaaattgagtagtggagaagaagtagcagtcatggtaaatggcttatcatcaacaccacttatggagttatatatagtaaataaaaaggtaaatgaaatattggaggaaaaaggggttaaaattcataaaacatttgtaggtgaatttatgacatctcttgaaatggctggattttcaataacagtattaaaacttgatagtgaattaaaagaattattagatgcaccagcaaacacaccagcatttaaagtaatataaagcaaagatttttaggtagagtttttgagattagatgaatttagtagagcatatctaagagtatgacggattctactaccaaagaattataatttagatgaagctttataatatataagcatcatctaaattaggctatataggaggaatagaaatgagtattcaaggaaaaaaagtaattgaaatattagaaaaaataagtgaaaagatagatgaaaataaagcatatttatcagagctagacgctgcaattggagatggagaccatggacttaatatgagcaagggatttaaggctgtagtagaaaagataaaagacgatgatggaaatgatatcggaggtatattaaagaagtcaggaatggcattagtatctaatgttggtggagcttcaggaccactatatggaacagcttttatgaaggcagctgtaagtgttaatggaaaatcggaagttgatattaatgatttcgcaaagatgctagatgaggctcttgaaggtataaaaatgagaggtaaaggtcaagctgatgataaaactatgatagatgctatagagccagcattaaaatcaataaaagaaggtatagatagcgggattgaagtcaaggaaattttaaaagcagcaaaagaagctgcttataaaggtgtagagcatacaaaagaaattatagctaaaaagggaagagcaagttatcttggagaaagaagtttagggcaccaagatgctggggctacatcttctgcaataatattagaaacaatatatgaagctttaaattagtagtttttattttgagttacatcaaaatagtcgttgaaggagaatatatatggtaggaatagtgataatatcgcatagtaaaaatatagcagatggtgtaaaggaattagcaagtcaaatggcacctaatgtagctataggtgtggctggaggaacagcagacggaagagttggcactgatatggataaaatatcagctgcaatagaagatgtttattcagaagatggagtaattattatttttgatttaggcagtgcctttatgaatgcagaaatggcaatagaatttctagatgaaaagatgaaggaaaaaataaagatagtagattgcccaatagttgagggagctgtgacagcagcagttgaaagtagtataggtaaaaatattgaagaaattgaagaagcattaaaacccatgaatctaggaaaaatgccttgaagtaataaaatatttatctgaagaataatattttaatagtatttatatagattaagaagataaatttctataatataaatttatcttcttaatttttttattctataggaatttatcacaagtgttgattaaccaaattttcactttaaattattaacttatttttgatatttttcaaaaataagttaatatatatat

SEQ ID NO: 95 - DNA, 23630 bp, Clostridium beijerinckii
attatatatattgcaaaaataatatttcataataattcaaagaaatattataaaatatttaaccataactgtgaattgtgaaatgtgcattgtgaattccaacaaatacattctacttatttctagggcttataaaaaaatgtatccaaataacttcaaaagttacttagatacatctcgtttttatagatatgaaatttaaagatttggcttattagataaacacatatttataaagttgttaagaatttaaattcgtatctcaactagaaatcataaatatatttgtgtagaaaacatttgaaaatgagctgttaaaggttcttagctgtaggttgttccattttagcttgtcaaactgaaagttggagcatgctaaaatggatacaacctgcggcttagaagcttcagcgatattttcatagcttttcggaacaaaatatttatgattttggtaagttaccacataaatttagttttagagttggatatctatataatactagaagtaaaaataggtttatacttcaggttccttggctgaaatattatctttctttttagctatctttgattctttagaagaactattctctgattgattagttatatcagaatgtgcagtagtaatagtatttactattgatccattagcactagccatgttagctaaaatcatgcttaaaattccttccatagcattaggagtttttccatcagccccacccataattactgtttgtggtacaagaggggatttgcttatctttaatgcttctgcaaaagcagttaatacgctttgttgtacttgtaattcaggaccgccataagcatcaactaaggctttagcagcagtaccttttgcaagaccaacctttgtttcttgttctgcagtagcttctgcaacagctttgatatttaaagcttgagctgcaccgactttttcaagtttgaaagcttcagctccagcttgtaattctacttgtttagcattagcagctgcattaagttcagtagctttagcgttagcggcagcttcagcttcttttgtatatcttaaagcatcagcttcttgagttctcttgtacttatcagcttcagcaagtttttgagtctttaaagctaattgttcagcaagttttaattcagatttacctttgttatcagcaacttctatatcgatacttgattgagtaagagccgcttgagctgcacttttagcaattgcttcattaagttctctttgtttttctgctgacttttgttttgcttcatttgttttaatttcttccaatgcaacttgtctatctctaagttgtgcaaggattagatcaattctcttatctgttgaagaagcagcaggtgtaccaattaatacttcctgtaattctaaatcatataatttgaatttttccttcatttctttagaagcttgttcttgaatagcgcttctatcctgtaccaattcaattaaagtcttagtttgtccaatattcttaaagtaacctgcaaccataggatctagtgattgttcaataagaagtttaatatcaccaaatctttggattactgaagaggcttttctataatcaatattaaacactacagtaagtgggagattaggttcaaaagcatccttagttataagattaatttcttttaaattatcatctagtttatgatctccaacctgaccgctaatccattttaatataacattagtagtaggaactggaatgattttacctgcataagtattaaatggatacttacctggcatcatacattctctccaaatacctttcttgccttgctcaacaagttctccatgagagtaatctgatccagatacatcttcacctttttcaccaaagtaactaacaacaacacctacataaccaatatctataatactttttggaactatgtccacattagcaaataacctattaataaagtaaacaccatctgtcaatacctgcatctgcttaccttttctaccaccagcagctaagaatttttcgggttcttggaagttactatggtaatattcatttgtaataccatcaccaactattggagcgattatagctccgttatctggagtaggtccttcattaacagttactataccaattgtatctttagttttaatattgtttccaaattcatcttgttcaagattttttgagctcgagataactacaggaatgaatccattaactctaagcaagtcacttctcatagtttctatttgctctgattcatcctttgaagtaaatattgaatgtactttatcctttgtaattatgataaactgagctagattaaatgcataagtaccttcacgaagaatttgcctttgaggacctttttgccctctattatttaaaaaagctactacatcctgaaaggatttacactcaggaataacttttcctaaagtttgtccatctgcaagactttctcctgatcttgcaaatacataacctatctgtccttgtggaattgttacaagtcttactttcttaaccttgtacttaaaaggagttttaaaatgcactccagctcttagaacgtgtggctgataaccagcttcacccttcaatgcaattaaaccatcagcaggcacagatccttttaagctccaccatttttctactatacctacctcatcagttccgatacttgtaaatcctatgccatagagtaatataaatagcgctaagattccaatacccacataaattaaaattgatattgttcctgaattcataaaattccctccataaatttattgtctttttctaagacattttcttgtttaattggtatagatagtaatatattatattaggcattaattgtaaatgtccaaattagtcagatttcctcattagatttgttgccgttaccaattagaataaactaaactttgttatctctcggaatatcattcaatcgctttaaatctacctccgatatatttactttttaagaatatttcaatgcaccctgatttatgagcactttttagtaattgagctatcagaaatcactattattaaatttttttaatgttatgtttgcataaactaatacaattgtatcacttgcttttaaatgaatatctcttagggataaatggcttttatctataggaattgtataagtttcaacaatgataatatagattgtatgaatccaataaattaaggcttataaatttttattacaatattttattatttaggggtataatgggagtgggcatgttgagaaacagcttctattttacttaggaatatttaagacaaattgaagggaatattaatatgaattatatattgaaaactgataatctaacaaaacagtatggaacacaattgagtgtaagtaacttatgtattaacatcgaggaaaatgatatatatgggtttataggaagaaatggagcaggaaaaacaactactttgaagatgatcttaggattgattcctgcaactagtggtaaaataacggttttgggaaaggaagttaataaaaagaatatttcttatttaagaaatataggatctattatagaatttccatcgtcttatgaaaacctaactgcttatgagaatttaaaacttcattctaattatatgggggtggaagataagggaataatagacgagtgcttagaaaaagttgatcttttaaatgataagaataaaaaagttaaagagcactcattaggtatgaaacaaaggcttggtatagcgcgtgcaattcttcataagccaaagcttttaattttagatgagcctactaatggattagatccactaggaataagagatcttagaaatttcatactaagacttgctaatgaggacaatatgacttttataatatcaagtcatatattaagtgaactagaacttacagtgactaagcttgggattatagaaaaaggaatcttattaaaagaagcttcaatgaatgagattaatgatagttacgaggaatatgttgatgttaaagttgacgatgtgaaaaaagcgcaaaaagtattaaatgaaaatttgaacttagatagttcattaattgatgacaactatttaagacttaatataaaaagaaaagaaatgaaaacaaactatataagcaaagcactagtaaataatagtgtggagttatttgaattaattaaacataaggaaggtttggaggattattttgtaaggatttcaggaggaataaggttatgatgaaatatgttttagcagagatttttaagtatagaaaggcaaagatcaaattctgtacaatagtgctatttattccaactgttatttcatttataatatatggctttaataaaaaatataattcattacttttatgggaaggttatttaaatgtgatattttctttcctaaatgatattgtagcacctatagtttatggaataatagctgcttatatctttggacatgaatatgaaaccaaaactatgaacgtaatgtttacttatcctattaatagaatgaagcttttattttctaagcttgcatgcattctttatattatagcaattactttaatattagtattcttcacttcaataattttaggatttttactaaagcatgaaagcttaaatatggatttacttatatattatttcatatcacttttaaagatgatagtatatcactttatgcttgtttgcataacttgtgcagttgctatctactcaaaaaatgtattgccaggcataatatttgttatctcagctactttcgcaaatatagtaatagtaaatacacagttatcagcattttatccatggagtgcaccagtcttgctaagtccacatgaaggagttggaagaatctttattccatatactttaagcatgatatctctagtagttatttttttaattgggctcgctatatcaattagaaaatatagatatgttgagtaaagatgtagcataaatctaaatttatgtggtaacttactgaaatcataaatattttggcttcgaaaagctatgaaaatatatttatctaataactcaaatttttaatttagatatctataaatgataaaaacaaagacttaaagtaactaacagatactttaagtctttggttttataaaaatctaatatttatgacgaattaaatcttaataatttatatagataacccaactagaaataagaattatgcttttgtgaaatgtttcattagaaatttgatggcttttaatcttagaatcacccatcataattacccagaaactggaacaaaagtatattattcatttcggcgagttgtatgcataaatttaagtctcacttggtttatctatagatatccaaatttaaaactaaacttatgtgataacttaccgaaatcataaatattttgttccgaaaagctatgaaaatatcgctaaaatttctaagcagcaagttgtatccaatttagcatgctccacctttcagtttgacaagctaaattggaacaacctacagctaagaacctttaacagctcattttcaaatgttttctccacaaatatatttatgatttctagtgatgatatgaacttaaagttttagcaaatttgcaaatacattcatctaataagttgaattcttaaattggatatctatatagataaacaacttaggaatttgatttatacttcgcaataaataccgtactagaaagtagaaacatttttatgcagcgggcattgaaaatgagctgttaaaagcttttaattgcaggttgttcaattaatgcttgtcacaatgaaattgggagcaagcattagttgtgcaacctgcaatttagaactttcagcgaaattttcatagtcctgtgaaataacaatgtttctactttcggtggattattgcataagtataagttatatattgtttatctatatatctctaattctatttatagattatgataagaaattttattaggttttaatcctttttctagtgaagtatatatgcgtttgtttcttggatctattaattcctcgttattataatagattctaggagttttccagagaagcttcaaagcgctgctaagaggcatttgatgatatctatctggccataattttaatatttcttcctttactagagaatagtatttaggattcattcctggaaatagatgatgctctgtgtggtaagaaaaattaaaatgtagaacatcaagccactttggaactgttactgagagactattaactaaaggatcatttataggtacaagaggatttaatctatgattacttgatatataacacattacaatgaaatttcctataaggaatggaagtaaatatgagaaaatccatttatcagtttcaactaagaagaataaacctatccatataatccaagggagtataaactgaatccatagttttatgcttttttgtcttttaaattctttaacatatataaagaacatgcgagttccatgaagagtaaaggaaatacttaatgctgagaaactaaatagtgagcgaaaccacaaaggaagtttataaatgtactttataaaagatctattgctaaattgctcaaagctcatccaagcatctggatcatttatttcatgttgagtgttagcatgatgactcatattgtgccacttaatccaaaggtttggacctatgcttaagggcaaaaaagccatacctccaagcaagttttttaaccaatgtgtttttacaacagtgccatgtaaaatttcatgcccaagaaagcctatggatgcaaaactaaagcctaaaactaaagatattaaaaagtttataatgttattaaatctacatagagtaattgtgagtattccacaaattataataattgtatatgcaagtcctccaaacagcctcgaaggtactggtttaaatgcatttttaggtagtttgggggatatcttattagcataccaccctatattatgaagttctttcatcgattttaccgcctttcgtgatccataaagtatcaataatatttatctaatcaacgtacatggatttaaaatataatttccaaagtacttaattcatgttaacaataatcattatcagttgtcaataattatttgttaatatttcttcgcaaatcttaattttgctaattgatgaaacaaaatttcaatcataagagttttttatgaaactttattaaattaaaaccaaaagcgggtaataatacggatagtactaaaatacatatattgtaaagcagcatttaaatatattgctaattgaagggggatattgttatgaaagttttaatggtttgctccgggggaatgtctagtgcaattgttgtacaagcgataaaaaaggaagctgataaagaaggatttgatctagaaatcaaagcggtaggaactagcgattttgaggatgaaattcagcaaaataaatatgatttagttttagttgcacctcaggtaagacataggctaaatggctttaaagatcaagctaaggaatatagtcttgaagtaattgctattgaaccaatgggatatacgcctcttggtggagcaagagttcttaagcaaataaagagctattgtaagtaaaaaccataataaatgataaggaggaagtatgaataaattttttaattggctagaaaagtacttattgccaccaatgactaaattatctgagcagaggcacttaaaagctattagggatggtatagtatctactattccacttataataattggaagtttttttctcgtaattgcagttccgccaaatgactggctaaagcaattagtggctccatatgttaatcagataatgtttccatatcgcttaagtatgggcataatggccttatatgcatcttttggaatagcatataatctagcaaagtcatataagctagatcctttatctggtggaagcttaggtcttgcagcattcttgcttacaaatgttccattaaatattgatcctaacggctggatgttatcgttatctagtttaggcggatctggtatgtttactgctattataatgtctatttttgctgtagaaatctttagagtatgcaaagaaaaaaatctaactattaagatgccaaaagaagtcccaacatcagttgctaattcttttgcagctcttattccagcagcttttattatagtaccaatatggatcataagagatttattaaattttgatattcaaaaatttgtgctaagtatatttacacctttggtaactgcaggtaattcacttcctggaatattagttccaatcttgcttattacacttttatggggatgcggaatacatggagattctgttgtaggtactgttgcaaggccaatatggcttgcaatgcttgatgctaatgtagcagctcaagcagctggacagcctattcctaatatagcaccagagccattttttcaatggtttgtatggattggagggtcaggagcaacaataggacttgtaatattaatgctaggctctaaatcaagatacttaaaagatatcgctagagcaagtttaatcccaggaatctgtaatattaatgagccggtcatatttggagctccaattatgttaaatccattattaataataccatttattcttgggccattaatttgcgggtgtgtatcatactttgctatgactttaaatttagtatctaaaccagttattttggcaccatggacattgccagcacctattggcgcttatctagcaactggtggagactggagagcaataattttagtattaataaatatagctattgtaactgctttatattttccattcttaaaagcatatgaaaagaaattaattaaagagggtatggagaataattaataaagattgattgtagttttaaatttgttatgcagttattgcacaaatactgcataacaaaatcaagttggaggcgcaagatgaatgagttgaaaattgtaataattggtggaggcagcagctatactccagaaataatagaaggatttataaagagaaaagacgaacttccagttaaggaaatagtcttagtcgatatagaagaaggtaaagaaaagcttaatatagtaggagctctagcaaagcgaatgtgtgaaaaggctaatttagacattagaatttctctcacattagatagaagagaggctctaagtgatactgattttgtagttacacaatttagagttggaggattagatgcaagggcacgagacgagagattccctttaaagtataacgtattaggtcaggaaacagttggtccaggaggttttgcaaaagctcttaggacaattcctgtaattctagatatttcaagagatatgaaggaattatgccctaatgcatggcttattaattttactaatccatcaggaattataacagaagctgtattaaaatatacaaatattaaatgtataggcctatgtaatgttccaatacacatgaagatggatgtagtttcaatgttagatgtgagcagtaaggatgtttttatagaatatgtaggacttaatcacttagtatggggacgaaatgtatggtataaaggcataaatgtaactgatagagttatagaaaaattaaaagatggcgcagaacttacaatgaaaaatatatcagatttaaaatggccaaagaaatttctagatgctttaggaatgataccatgtccgtatcataggtattactatatgacagatagattgttgaaggaagaaaaagatgcagccaaaactattgggacacgagcagaacaggtaaagaaaattgaagcaagcttatttgaaaaatataaggataaaaatttagacgttaaaccacctgagttagaaaaaagaggtggagcatattattcggatgcagctgtatcacttataagttcgatatacaatgataaaaaagacattcatacaataaatgttaaaaataatgggactattaaaggaattccagacgactccgttgttgaagttaactgtttagtagataagagaggtgcaactccactatctttgacacgacctgtagaagaaaaagttttaggccttattcacagtgtgaaattttatgagatatcaacaatagaagctggagtacatggaaatacaaatcaagctataatggcactagctaataatccactagtcccatcagtagatattgcaattaagctatttgaggacttgtgttcgttaaacaaagggtatttgccacaatttaataaataatattaggagatgaactatatggagcaagaaatatttgaaataatatcacacgcaggcgactcaagagcatatgcatttgaagctctagatgaagctgaaaataaaaactacgataaagcagaagaatttttaaaaaaggctagagaagaactcaaactagctcatagcactcagacgaaattgattcaagctgagataaatggaaaaggaattaaaataacgttacttatggttcatgcgcaagatcaattaatgactgccatgtctgaaaatgttctaattgagaaaatggtaagaatgtataagattatgaatgaaaagtaaaataaattaaatattatgtaattaaatgaatagtctatacaaatttatgaaaaaatagaatgaaaaaaaatctatacaggatataaaaaaatgtagtggaggtaagtatttatgaaaaaatttaaatgtatagtctttggaattttactagtctgtactttcatattacctgtttcttattgtaatgcagaagaaactactactacgactgaatctagcaatagcaaagtttatgacttacaacaagatgcttttaaatattatcaagtcgaacataaaggagctttaggaattccagtatcctactcatgtacagaatctgaggctggagatattagaaaatataccgtggagcctaagtattctgaaagaattgatggaaataaagttgaaatacttatttcacaggttaatgttactggtgaatctgataacttctattcagttttaaaagataataagtatataaagaatattaagctagataagcttgataataatacagcaaaagttgatattgagacttctgaaaaacttaatgttaaaataaatcctgtaaaaaggagatattcttcattaggggacaataaatatgagtttaagacatttatagatgttacatttgaagaaaaggttaaagataactcgaaaataataattattgaccctggtcatggaggatcagaacttggagcaacagccaatttcacttatgaaaagcagttaaatttggatatatctaaaagagttaaagaaaaccttgaaagagcaggatatcgtatatatataactagagatgatgatagcaatgtaggattattagatagaacagatccagcaaatcttttgaatgcagatttatttttctgtatacacaataattcacttccattagatgttaatatgcaatctgtttatatgtttaggggaactactgtattatataattctactgctccaaaaccaggaagagaatttgcaacaatactcatgagagaagtgtctagcaccataaaaactaacacatatccacttcaagatagaccaaatctcgcagtgttatcatcagcatggtgccccgcagtgcttatggaaacgactgttgagtgcgatgatggtgacgcaaagatgatgatgcatagacttaacagccagaaagttgcagatgcatcacttagagctgtcaataaatattttataaaataaaaagaatcaggggtggatgtatagatgtcaaaaaaagttattaatagattattctcagtcattactattacatcattgatttttatgacatgtagtacaagtgcaaaagctgatacaacagaaactgatttctcacatacggattttggtacaatttcaggtttatcaattgaaaagcaaaatccatatgtcgaatatgcaggagttgatcattatccagtgctaagtggtgacactattaaaataaatatgagttccaagtatgatggagattattctgactacagcaattatgatccagtgcagtatagagtatttatagctaggagtgaaaatgaagattacacagaattaactgatggatattcaaatccaatacccgcatataatgaatttacaatagaagataataatgcattaactgaaggtaaatataaagttatgatttttgtaaaaaggtcttcatctaatggagcagatcaaaattcatatggagcttatgataaaatatataatttcaattttacttgctacaatagcttagatgtgcctaaaaatgacgattcaaaaatttctaattcatcaggcaatattgtaaatgatggaatggctgtagaagataatgattatatatattatataaatagggtaggagatgtctacggagcagctcctgattatttgtacaaaataaggaaaaatgatccgcctagaaaggatatatgtgatttaagttacaatacacaattaattccaaatagagtatggaatcttaatcttgtagacgactggatttactatagcaattggaaagatgcttttcatcacagtataaataaagttaaaacagatggaacagaggacacatgcatagcaaatgaagcagtaggaaatatgtttgtagaaggaaattggatatattatgttaaaagaactaattcacattcaattgatttaaataatatatacaaaatatctttagatggcagttgtagaattagacttaattcatctgctacagaggatatgactgcaagcaatggatggatatattacactaatatatctgatggatataaaatttacagaatgagattagatggaagtgagaatacaaaagtatgtgatgatgaaactttatttattactgtttgtggagatacagttttttatagcaacaaatcagatagtgataagttatataaagtaaatggagatggaacaggaaaagctaagttatctaatgacaaagctacttttataaatgcaagcaaagattatgtctattatgtgaattattcagataatgaaaatctttataaaattccagttggaggaggaagatctgaaaagattactaacgaatatggagctaatataacaattttagaagataaaatattttttaatggtatgttttatgataaataaatcatatcaattaaatagagaaacactatatttaaaatacttgttagtgaaaagctataagaaaatatagatagaccaagtgagacatgaatctatgcatataacgctccgaaataaggagtatgctttatatgttgtttatctataacaaaaattttaattaagggagaatttttaatgagaaggctaggaatatcagtttatcctatgcacagtagtgcaaatgaaatagaagattatataaaattggcatataaatataattttaaaagaatttttacatgtcttttatcttttgatggaagtaaagaagtaataatcaataatttcaagaaaataatacaatgtgcaaatgaaaatgatatggaagtaatagcagatataagtcctaaagtattcgatgaacttggaattgattataagaatttagatttttttaaggagctaggactctatggtataagacttgatcttggatttactggtttagaggaatctattatgtcatttacaagtaagaaattgaaaatagaattaaacatgagcaatgggacaaaatatatagataatatattctcttatatgccaaatgcagataatatattaggctgtcataatttttatccacacagatatacaggattaagctatgaacattttataaaaaccagcaagcagttcaaatcgttaggaattagaacagcagcatttatttcatctcacagtgcagatcatggtccatggcctgtaaacgagggattatgcactcttgaaattcatagagagcttccaataacaattcaagcaaagcatttatggacatctgacttaatagatgatgtaattattgcaaatgcctttgctagtgaagaagaattaaaagcattaagtgaaatagatccttatgttttgactttaaattgtgagataaataaaaatgcacctgaaacagagaagaaaatagtgcttgaagaatttcattttaacagaggagatgtatctgattatttaataagatcaactcaaagcagagttaaatataaagaccacaattttgaagtatttaatactccagatataagaagaggagatattattatagaaagttcattatatggacattatgcaggagaaatgcagatagctaaaaagcctatgaaaaactctggcaaatcaaatgtagtaggaagaattgcagaggaagaactgtttttgattgatactatagctccatggcaaaaatttaaattagtaaataattaatgaaaaagatgttataatctatatggatcaaattgaaataaaagatgtatatgtttcaaaaagtttatttgattcagatttactttaaactatgggtatccaaattaataattatatttgcagaatagagtttatgatttagatttattaaataacaagttgacattagggacaagtttcaagtgataagttaattaaaattttttgagtttttacaaaggaagagatgtgacgatatatgcgattagataaatttctagcagaggcggctgttggaagcagaaaaaatgtcagaatttatattaaagaaggcatggtaaaggtaaataaagagctggtaacagagccttcaatggaaattgatgaaaactgtgatgtcattgagtatcttaatgagatagtcagctatgctggaaaattatattacatgtttaacaaaccagcaggttgtattactgcaaaaactgatgagattcataagaccgtatttgattttttaggcgaagctggtacgaaaggaatatttcatgttggaaggttagacaaggatacagaaggattattgttatttacaaatgatggagaatttgaacataaggtcatgtatccagaaaagcatgttgaaaaaacttatttcttttgggcattaggttctttaagcgaagaagataagaaccaattagagcagggaacttatattggacaaggtaaaatattaactaagcctgcaagaatagaagtagataagtttggcgtatatgaagatcttaaacatgaaatggccaccaataatgtgaacaatataaactcaaatcatcatacgcagccagtcgtttctggatatcttactatttcagaaggacgcaagcatcaagtaaagcgtatgttaaagtccgtaggctgctacgttatatatttaaagagaatttcaattggtggactagctttagacaaatcactagagaaaggccagtataggtctttgacagagttagaaattcaaaaggtgctaggaaatttataaagtagctgataattaataagctaagattttttgcatttaaaaaaatcttagctttaatttttaagaaaatatgtattataaatagaagtctaattcattaaaatttatttcgaaaatttcttaaatattgactttattttagcataaataacgcttaataggttaattaatgtaaatttatgatataatatgtataaaatagataagtattaaataaataagttatcaaaatcaagttaaaataaataaaatgtagaatttaagctaaagtaatagaattttagaaagataggaagtgggttaatcatgattggatttcagctaatattttttgttttcgtagcttttataatttttataaacatcagtaaatatattaaaaatgaaaactcaccaattatatccactagggcaaaattaattaagaaaaaaagagaaacgtgcacaaatacagacagcaatggagttatgacaactactgaaaagttaattttagaatttgagttagacactgggagtgaaatgaaatttatagttggaagacgtgtcttcaaaaatgttccagaacatgaatggggaacattaacttttcaaggaacacgctttttaaagtttaactcatcaaatggggttgttgaaaaatagcatcatatacctgttctaaattttgtaggagtaagagctgttagttctttaaaaattctgttaaaatttctctgactttcaaatccacattccaaagctataaccgtaactggaaggtctgtttcgctaaggagtttttgagctttatttattctcaatctatttatgtaatcattaaattggtagccaatcttatttgaaaaaattcttgagagataaaacttactaaaacctaaatctttagctatactatctagtgaaattttctcatggtaatgaatttcaatatatttaagtagattttgcattgtactgttataaaaagtgctgctttttttaaatgaaaaatgcgaatcaagctttccaagtatggtgtataaaagccctttaataacatatttattattagaacttgtatattcgtcatggagcatatataaaagagaacttaccccatcatcgacaatattttttgacataaatggattctccagtgttttgtccattcgtataccaaagaagctacgtgtaagatctggtgagaaaataaatagaataatttttgaaaatccgtcactattaaaagtatgtatatcattagggaagcagatagaaacttcaccagctttaaggcagcatggagtatcgtttattgtaacttctatagatccttcaataacataagctatttctacatatggatgtaaatgtggaggaaaactgaaattttctaatatttttgaactaaaaaagttttgatcgccagatttatttgcttcaaaaaatggatacatataagacctccaaatatttaatatatataattagtatgtagataattcaatggtattacaagatattgatagaaacacaatccttgcaaaattctaagaagaccgattgtaaataatgtacacttaaattaaatttaacataaaaaatataacatgcactgcaatatatgtctatattgggttaatatattgccagcttaatttattaaatccatgtaatattgaagtaaacaaaagaaggagagttttaaattatgtctgtaaaatatgtacatgatatgactgaaggtaatgaagtttcccatattataaaattcacttggccaatgcttataggcaatgtatttcagcagttttataacttgattgattcaatagttgtaggaaagtttgttggtgctaatgctttagccgcagtaggtgcttgtggatctctaagttttctttttttctctgtatgcttgggattgtctgttggtataggtataatcatttctcaatattttggagccaagaaggaagaacaagtaaagagagccattgccaattcaacttatgtgattggtgcatctggtgttgttatgagtatattaggagttgtttttgctcgtcaagttttacaacttttgaatacaccacctgaaattttaaatgattctgtagcttttttaagaatagcatcaggaggaatgatcgctgtagcatcctataatgctatagcagcaatacttagagcattaggtgactccagtacacctttagtttttctaattatttcttgcgcaattaatgttgtattagatttaatctttgtgctaaaatttggatttggtgtatcaggtactgcctatgctactgttatttctcaggcatgtgctgcaattggctgcttggtatttgccctgatcaagaatccatattttaaattaaagaaagaacactggaaaatgagtgaatcaatcataactaaatgtataaggattggagtacctgtagcagctcagaattcactgattgctgtttcattagtagcgcttcagagtgtagtaaatggatttggagagacagctgttgcagcatttacagctactagtagagtagaacagctaatacagcagccgttcaattcattaggggcagctatgtctacatttgcaggtcaaaatatgggagctaataaacttgatagggtaaaaaaaggatatcacaaaagcattttaatagtagctggatttagccttttagcatttattgcagctcaatttggaggtcaggctataatggaagtgtttgttaaagatgaatcagtaataaatcttggagataaagcaataagaattacaagttgtgcatactttcctcttggaatgatttacgttacaagaggtgtactaaatggtacaggagatgcattttatgctatggttaacggttttgttgaagtggctggaagagttggattttcaagtggactagctatacttcctttcctaggagtttggagtgtgtgggtaaccagtggactaacttggactattacagctatagcaagcgtaatacgttacaggcaaggtaagtggcaagataaatccatagttaaaccagttgaaaaaactatagagtacaaaaagtatgctgagagcaagtaaatgaatatcttataaagtgctgtaagcaaaagaaaaacaaattaaaataattttagggcaaatattgactataaaaaggctgtgtttttacgtagcctctttattttctatgaattaataaaacattaagttcatattttcatgcttttcggaagaaaagtatattactcatttcggttaggtatactcataagtatagcttatagttagtttatctatatacataaactaattagaatagtataatcattctgttaatgatattttagtaaaagtaatttttaactttacttttagggaggaattgttttgtcagaaaaaaataaaaaatataatatcactaaggcttcaaattcgaaagttaacgagagttctggagctgtagttgaagctggaaagcctttatcacagtcaatgttatggaaattgcagacagaattttttgcaaaccaaggtccagaggcttggattaaaggtattgtaccacaatatataacaaccaatccgtatatcgcaaatcaatacgctaaaactgtctttggatatttgcgagactatgttggaagagaagatgtagataaaaatactgttatatatattatggagcttgcagcaggagttggacgatttacttatacgtttctaaaaagatttttacatatgattgaaaattcttcgttaaaagatataaagtttaaatacatagtaacggattttgctgaaagaaatattgaatattggcagaatcatagctttttaagtccttatttcgaagctggaatacttgattgtgcaacttttgatatatctaaggatgatgaaattaaacttagacatagtggtgaagtattatcaaaagggaaaatgaagaatcctttaattttatttgctaattatacttttgacagtcttccacaagacactttttatgttaataacggagagatttatgaaggagtaataacaataacttctccagacgaaaaaggagatcctaatgataaatcaattcttgcaggattagattattattatacagataaaaaaattgatgggaatagttattacgaagataagaatttaaatgatgttttgatgcattacaaaaattctttagaggacacagcattctatatgcctataattggattaagatgtatttcaagattaagaaagttgtttaatgatgatgtgattttgatatctgctgataaaggttataagaatgaagaaagcatggataaaaattatcatccatttttatcaaagcatggatgtatttctatgacggtaaattttcatgctatagagttatattttaaagaactcggcggaaaagcaatacatagtatatatgaacacgaaaacataaatgtgtctctatttatggtaagtaatagtgataatgattttattgaaacttcaatggcttacaatgaaattatagaaagtgtaggtccagatgatttctatataatgaaaaaagcaattatgcctttgagtaactccttgaccactaaggaacttttgacttttctaagatttacattatgggattcaagaactttgcttgagttatacaatattttaattgaaagaatagaaaatgaagaaaacttccctaaagatgaacttgctgatgatatcaataaagtttgggaatactatttccctattggtgaagaaggcgacttaggatattattttggttctatattaggttatcttggctatgataatgatgcactaaagcttctagaatcttcactagagttttatggtgaatgcccagaaacaaattacgaaattgcactttgttattataatttacagcaaattgataaagccttagagtatacagagaaatctattggattagattcagattttgaacagggtaaaaacttaaaaaatataattgaagatatattaagcgataactaaaattttaattaaaataaaaacagatgtgaattagggaaaattattctaattcacatctatttttttactcaagagctcagtgaaattcaaatcaattattttatttaataaacttataactcattatgtcatataaattgaaaatagtaattcttatatacttccatatgttacaaaataatttataaaaacttattagacgttatgctttcaatttttggatttaattggaatataaattcatcaataataatattattataacagttaaatttctaaaagggataattggtcttaaataataatttttctttaataatcgatagcatattattaaaatctggaggtgtatagagaaatgacaaagattaagacagtacaggaagcagtaaaaaatattaaagatggcatgaagataatgacagcaggttttttaggagtgggtgctccattaaagatgatagaggagctagcgaatacaaatattaaggatcttacacttattcaagctgtatcagctcaaccaggggagactcatgatgttggtatgctcatagcaaataaacaaataaaaaaatttgtaggtgcacatattgggacttgccctgaagcacaagaacaatataatgcaggcacattagaagtagaatttatacctatgggaaccatagttgaatgtatacgagctggtggagctggacttggcgcagttataacaccaactgggcttggtacagaaattgagaatggaagagataaacttattgtagatggaaaggaatatttagtatttccagctataaaagcagacgttgcattaattaaaggctgtaaggctgataagttcggaaatattttatatagaggaacaacaaaaggaacaaatacaagtatggcacttgctgctgatttagttatagccgaagtggatgaaatcgttgatgtgggtgaaatccctcctgatagtgttggaacaccgggtatattagtagatataatagttcaaggtgattcttttgaagatagaagaaaatattttgaagatttatggacaagaactaataaaatgagataggggtgaaaatgatgaatggtaaagagataattgcaagaagaatcgcaaaagaatttaaagaaggaatggttgctaatttaggattcggtatacctaatatggctgccaattatttaccaaagggaatggaaataacactacaatgtgaaaatggcgcattgaagtttggcgcaactccaaagataggagaatctgacccagatctagctaattcaggtggatctccaatcactttactaccaggatcatcaacctttgatatggatttatcttttgcaataataagaggtggacatgttgacataactgcattgggcgctttagaggtagatcaagaaggaaatattgcaaattggaaaatacctggtattttttcgcctggtatgggaggcgcaatggatcttttagtgggagctaaatatgtaatagctgcattaagccataatgataaaaaagggaactcaaaagtattaaaaaaatgtacattgcctttatcggctgccaaatgtgtcaatctaataattacagataaagcggttatgaaagttacagataaaggattagttctaatagaagtagcaccaggtttaactgttgatgaagtgttgaaaacaacggatgccgatttgataatagatgataatgttaaggaaatggaaatataaatataaatatgaagtaaaagttgtccctatctttgtttgctatgagattcctttcgtgcatttagagatggtctgttaatcagttactagaattttataattatctataaagacggttttgcagacttaccaacaaaaccaggtctatgacttattattgaagagaataaagtaagagaagttaatatgaaaggtcttaactaatctaatccaaattagagaaattatgatggaacaaaagctgaatggtagaataatataaactatataggaaataagattaagggataactataataattatggttatctctttttcaatgtaatattgaccaacatataccaacatataccaatattaaagcaatatacaagaaaagtgattataattccattctactttatttcctggccattagataaaataaagatttctaaatcttgacgtaataggcatgataaaatataattgttagtgatattcattatcaataataattataaggagtagaaatatgatctttatttgcacattaattctagtaacgattttatcattacttttaacatcatctattaagaaaaattattatctttattattcgctggcaacgggtattgcgataatcacatcattttatgaaatactacgaataacatctaacgcaaagcttgaaggggttattctaacccttgaaaaaacttcaataagaggattgatatcagtatcattttttatattagtaatgtatgcaggggctttaaatcaaaaatggacaataacaaagaaattacgcagcattagagcagaattagctattataggtgcaatcatgctgttaccccatggaatagtatattttattcgttttataatactaaagcttcctagaatcattaatgaaggttcgcttcctgtattatacttaagctatatagcagttggactcattggatttattataatgataccattatttataacctcatttaagaaaataaggcgtaaaatgcaaggaaagcaatggaagaggcttcaaagatgggcatatttgttttactttttaacatattttcatattttacttatacttttaaatgaaaaggaaatagattgggtaaggttaatcagctacaccatagtttttattaactatatggctttaaagttattaaaaaataaagaaatcaatatagcaaaatcatttaaattaagtaaaatgaacaactaatattcaatataaaatttatgaagttaaaatatcaatttctcgctaatcgagtttgtgatattttc

SEQ ID NO: 96 - DNA, 23608 bp, Clostridium beijerinckii
gaaacataatatgtccgactaaagtatcaataatttctgcatcattagaattttcttaattaaattaacgtcaatattaacttttagttataccattaaaagcgcaaatgaccatattccttataaaattctcatctactatatcacctgttattaataatctataaaataatggaccaaaaactaaatccataactaattctatatctaaatcctcttttagttctcccctcgaaataccacgttctagaatatatcttgaatcaagtctacgaggcttaaaatatactgttcggtatgtttcagctaatttttgatcagattgtccttctgctattatctcattaattaccttcccctcgcgactagttagaaaatttgctaagttatttacttgaattattatatcatccatagttgatcctgtatccggaactgggagtctcacaacagctgcgtcaaaaaaagcatccataacaacagctgccttattggaccaccatttataaatagtagctttactaactccagctttctcagcaatcttttcaattgtaacagatccaaaaccactttcaagcaataaatcataggcagcggaaagaattgcatttttagttttctcgctacgagggcgtcctaactttttctccatatgtagttacctccattgtaattaacttatagcctatacttagtaaactatacgtctattatactatatatattatacttatcaattctaatttatctcttttaaacatttgacttaattgttagtgatattatacctcttatgcctttttaatagacttaaaaataatttttttatttcttcaaaaaactatttacaatactgaacgtttagtataatatatatttataaactaaacgttcagttttatcaaatgccttattattttattaagaatttttaagatatatggcgggaataatatttattaatattcaattaaaaacaaataagtaatagatcttataaatttcatcaaattatatgtattatgaggaggaaaaataaatgaaagttgtagcatttaacggaagtccaaataaagaaggtaatacttatcatggaataaaattagttactgatgaactagaaaaggaaggaatagaaacagaaataattcatgtggggaacaagtctataagaggttgcattgcttgcggatattgcacaaaaaataaaaatggtaaatgtgccattgctaccgatccagttaacgagtggattgaaaaaatgaaagatgctgatggcataatcttagggtcaccagtacactattcagcaattgccggaacaatgaaatcatttttagatagggcttttcgtgtagccgaagctactgatagtatgttaagacttaaagtaggcattgcagtagtcgcagtaagacgtgcaggtggaattccaaccttcgatcaattaaacaattatattaatcattctgaaatgattattcctacttcaaactattggaatgtaattaacggaagagccccaggtgaagtaatgcaagatgaagaaggacaacaaattatgagaatcctaggcaagaacatggcctggcttatgaagcttatcgaaaatggtcaaggagttataaaaactcctgaaagagaagaaaagatttttactaattttattcgataaacttttatcgaatctaacactcatataattgtagcattgatatttataagaaatttttattacttgtaaattagacctttgctcaattatatgtattatataattttaaggaagtgatttataaatgtatcaatcaactaatgctgtattaaaaacaaattcatcaatagataataccaatactagacctatattaactaaattactaatcttagttatgtcaatagcttgtggacttacagtcgcaaatctatattacattcaaccgcttttaggagacatagcaaaaacttttcatgttgaccaattaagtataggttttgcagctatgctcacacaaataggttatgcaatcggaatgatatttatattgcctttaggagatataaaagaaaagagaaacttaatagtaataatgcttttattctcagtaatttcacttatgagtatgtttttctcttcaaatatatatattcttacgatctcttcttttgccgttgggtttacttctataatccctcaacttattattcctttggcagcacagctctcaaatccgcaacaaagaggacaaactattggcacaataatgagcggtttattaattggaatattactttctcgtacagttagtggcatattaggaagctaccttggctggagaatagtttatcttattgcagcaattatgatgtttgctctcatgcttattcttagaaaattaataccattatgcaaccctatttccgacattaaatattctgagttattaaaatcgatgatacacttaataaaaacagaaccgatcttaagagaatcctctcttaatggtgcattaatgttttcagctttcagtgccttttggacatcccttatatttttacttgaaagttctcattacaatatgggagctgaagcagctggcttacttgggttagtaggtgttagcggtgctcttgctgctccactggttggaaaagtagctgataaaagaggttcaagatttgctataggcatatgtatagtcgtggttatagcttcctatttattatttttcctattcggattcaaaatttggggattagttttaggagtaattcttctagatttaggagtacaatcttgtaatgtatctaatcaggcaagagtacattctttaaatgaagaaacacgtaatagacttaatactatttatatggttagcttttttcttggtggggcgtttggatcgtttttaggttcctatagctattctcactttggatggtatggggtatgtacttttggtataataactcaaatccttgcgcttattatacacaagattagcaaaaaagcataaagttctattttgcatatttaaattttattgattagaattttccttttattcacctgagaaataatcctgcattaatatatatgttgcaattcacaatgcatatttatcaattcataattacagataaaattcttgcaatacttttagaattatgaggaagaattatttatcgaatatatatattaatattatgtgataacttataaaaggacttacctttatatggtgagtcctactttttaataataacattgtccgctgcatttgccatcaagtaacttattttttatatattcttcataagtttcacttatttcagtattatctaatatagctatggccttttttagactttttatatctttttccatattctcaatagaatttcctcttcctactacctttaaatgagtaatgccagctttctttaacttttttagagaacataatccacatccagtttctccaatgaaatatgaaacttccattccctcttcgctttcacttccatattcattttctggatcagattgattttctatatagagttcttccttatccttgtcatttatatccttgtaataagactcaattctcttatcaacttcgcaaaaactactctcatttttatctattcttaatagttcatatggaactttacacaaatgtatcatttcatcacaatgtagggagctgcaaaaagcaccagtataatggcatctttcatttaaaataaatgcttcatattcaagattttctacttcgttgcttcttatacatgatttcatatcttcgattgtatttttcctatgaaatatgtatcgtgatatatttagtttattgaaaaaccccatagaaagccggtttagctcagcgcattctccacttaaatgtattgagcactttatattcctttcctttaaatataatataagcgcaatatctgctacaataaaatcattaaagccaatatttatcaaatcttttattatgttagctatcatttcatattgttcttcaagatagtataaataattaaaagttatatttactggtactttataaaaatcaaccattttctttagtattttcatgtcctcaagtgaacttatttgaatgttataataaagtacttctctcctatttaaaggaaataaacttccatattttttgttccattcataaggaacatatccacaaaacacttcatctgctccagcccttactaattttatataatcatcaatacatcccattcctgctactatcttcattatgttttcctccttcatagataaacctatatgtgcgtatgtgaaatagttacatatcaccgttaaactctacataagtataagctcatatttcgatatctatagaaaatttaaaacaattctatcgattccgctatttatgtaatactctaattcttttggatttttaagcaaagtatcatcaaaagtgaatagcgaattatatcttccaaccatttttaagtgctttggataagaaaatacataatcgctacaatactttgggcagtcagtaacaagtttctgatttcctctatccatagttgtacacattgcatatagtggacaatattgagatgtatttgtttgatagaaaggaatatgcatactatggtgcccatctgcaatagaaattttataaccacaattttcatattcatatcgttctattttacattctctcaaaaactttgtaaaaattgaactattaagactgtttcttgctataagttctttattttctaagtaccctttcttgtaaatatatcttggatctttttttctcttatttaataaaacgcctagtgacagctcgaaaatatctatcttatctttaagcaattttagcatcccaaaatcatttacaacaatttctatcttagtattattttcattacaccaattatatactacctctattatatcttttgttttttctatacaacactctctcatatatgtaaaacatagtgttatctcaatgctctcttctttggctttctgcatcatgccttttaacaattttatttttggaaataagttatgacaaaattcatttccaatataaatcctgttaatatctttcttaaatagctcatcgctccctataaaattttcatttaagtaatccatcttaaatgtttggatatcattatccataaactttttatataatatatcattatctaaagaaatagctatctccactgaatcaataatatcttcatcccaatccacataatttacgcctaacagccactcttctttctgttctaaataatccttataaaactcctcatctagctttgccggataattaaccatttcctttgaaaattcattgccatcaccaaaagcttttaacataatataatttgaatactttttaaaagcacttcttacattatgtgagtatttttgtgattcaatgctgaaaatatatattaaactaaaatcttcttttattttttccaccatattacaatcttgtattataatttcttcatatctgttttcatcgaacttatgaaatgcaacttttatactgcttatcttttctatttcttcagctacacgcactgttaatttttcaggagatatttttattatacatacttctttgtcatctaataaacatgttattagtcctgctggcaataattcaacttcttctttttccaaaatgatacctcctaaactttttcatatatatctttaaaaacacttcatataccttattttatctgatcccacttaattcatcaatttaactatatatattttgcaattaagtttctacattataaattatacttgacttgtactagcagcaatatccatgagatattatggttatcaaaatgaacgtatataaaaccaaacaattaagtacggatacaataattttatatacaaaaaaactagaatagatatagtctcaaagatttaaaattttacgaatatttgtctaaaaaactttgtactttttcccaatgttcttctcatgtaaaaaaatcactcaccgcaaaattgtagtgagtgattttttttagattataaatctctaagtacttaacattttttcttgattcggttaacttttgtcatcatgaaattcatttaatattcattttaacaattcaataaccattctcccatctcttttgcctctgacagaacttctgaacgttctaataactcgtttatttcacgtaaacctccagtaatcagtgtcttgtattctccaaaacctaaaactttaaggcttttaccagttaaatcaaaatagctcgtgtattgtactatatcgcctcccccaaatgtagatacaaataagacctttttatttggagaaagatagctcgaataatcttctttcatataagcaacaagtctatcaacaacagctttcaactgtgcagacatctgataaatatatataggcgtagcaaatataataccatcagcatcatcaatatcgtcatatattaattgcatatcatctttaatggcacatgtacctgtttttttacaggcattacatccctgacagcaacttattttcattgtatttaggttataagtttttatttcagtttctttattatccattgatttggatacctcattaactagcgccattgtatttccagttttgtgcggacttccatttaatattatgatttttttcatagacataaacctctccaatctttcattgattcaaaattattttaatttcttttcacatcacaaaaattacggccatttaggattttgtgttttatctgcagcttaatacattgccttgtattaatactaacaattggtttatcataatgatagatattattttatactagtaatatcactaccacgataaaggaaggcaaaggtttatggataatccaaaacagagatataaagaactaggagattttttgagaacacgacgagcaaagattttaccatcacaggttggtttgcctgaaggtaccaggagaagaacaattgggcttagacgagaagaagtttcttttctttcaggcgttgggctaacttggtatacatggcttgaacaaggacgtcccataaccatatcttcacaagtcatcgaaagtttagccagaactttgatgctggataaaaaggaaactatgcatctttacaatcttgcgagactaacacctccaactgaaatagctacctatgataatactgttaatccaatgcttaagcatgtgttagataacatagagttttctccagcaactatacttgatcaacgatacaatgttattgcatggaatagagcttctgaaaaacttctttatgattataataaacttgatacttctaaacgcaacatgttaagaattatgtttactaatgaagaatataaaaaaacaattattgattgggaatcaacagcacaaagtatgcttgccagatttagaatagcttatggcaaacttgttgaagatccctatatcaaagagcttgtagaagaacttaaaagcgaaagcaaagaattcaattcatggtggacaatgcataatgttgaaatggaagaggaaatagtaaaaagcattactcatccgattttaggtgaattgaactttgagtataccagctatatggttttatcagatagaaatttaaaaatgacaattcttacagcattgcccgggtcagatactgaaaaaaagataaaacaatttctactgggttaaaccagacgtagtgtactctgaagttagattagtaaggaatactaaatgcatattttgtacttatactctttcaaacacttacatattcatcttgatatctcaactcaattttctgtgcaagtttacctttaaacagcatgaaagcccactgaaatcaatgggctttctattacatgaatataatattgttcaagataagctaaagaaaaatagtactatatccactatataaaagtatttctataatataaacttataaattctagattcatacggcttaagttctatgctatcaatcggatcattttcattaacattataatttgaaattaaaagttctttagatttaaattcaaattttctttcaagtacaaactctgtctcatttcctgtaaagttgcatataactagtaacatttcattttctaaggttcttgtatatgcaaaaatttctttgttttcttctaagatcaattcatattttccatgaactactactggatttgtttttcttatttttattaatttcttatagtaattaaatatagagttttcgtcttttaattgtgatttaacgtttatttccttataattaggatttacttttagccaaggctgtccacttgtaaaccctgcattttgactatcatcccattgtattggagtacgggcattatctctgccttttgtgtatatagatagcattatctcctcatgagtataaccttgtttttttctttcattatacatgttcaaagtttctatatccttgtaatcctctaatgattcaaatcttacatttgtcataccaagctcttcaccttgatatatatatggagtccccttcattccatgtaataatgtagcaagcattttcgcactttctaccctatattctttgtcattcccccaccttgaaactattcttggtacgtcatgattattccagaataaactattccagcctgtgccttctagctctacttgccatctagataatgccttctttaaatctaataattctaacggctttaaatcccatttttctttacctggttgttgatctaataaaatgtgctcaaattgaaatatcatgctaagttcactatcatctggatttgaatatttcttagctatttctgtagtacatccccaagtctctccaactgttagtaaatctttgcctccgaatgtcttcttattcatttctctaatatattcatggagttttggaccattatgcgtaacttttttatctggaatctttcctataagttcaattacatccattctaaatccgccaatacctttatcaatccaaaagttcatcattttataaattctattgcgcacctcttcattttcccagttcaaatctggctgttttttactaaataaatgtaaataatactgccctgtagtttcatcatattgccatgcactaccgctaaatgttgatcttaaatcatttggttcttctccatttactggatctctccatatataataatctctataaggattatcttttgatttcttagcttcgatgaaccatttatgttcgtcagaagtatggtttacaactaaatccataagaatttttattcctcttttatttccttcctcaataagatcatccatatcttccattgttccaaattcatccattatatcttcataatcacttatatcatatccattatcatcgtttggtgatttatatactggagataaccatattacatctatccccaattctttcaagtaatctaacttctctattattcctcttaaatctccaattccatctccattagaatcattaaaactcctaggatatacctgataaacaacgctttctttccaccattttttatccatgacttattctccttttaatattacttattttatttcgtttaaatgcatttttattatttaacagctccagtgacaataccatttcttatccatttttgcgcaaagatgtatacaataaacattggtaataatgctagcaagtatgacgcaaaagccagattataatttgtagtaaattgagactggaatacgtattgaactaaaggcaatgtagccatctctggcttacctaagataataagtggcagcatgaaatcattccatgtccacaaacaagtagtaattgcaaccgtagcattaataggttttagtaaagggaaaattattctccaaaatacttgaaatgtagaagcaccatctattgttgctgcttcttcaagtgaaactggaattgatttaatataacctgaatataaaaatatattaaaaggtagtccaaatacaacgtataaacatattattccaattatattatccatgtttaatatatttacttgttttacaagaggcagcataattattggaaatggtacaaacatagcacttaaaaagtaatagtataatgcattaaaaaactttttctttctatttctagctatggcatatgaaaccaaagaatttgagagtattgtaagaattaataccgaaattgttattgttaaactgttttttagagcatcaaagaaatttgtcatttcaatggcttcagtaaaattttcaaaacgcaatgcctttggaaatgataaagcacttggtaccatatcttgtggagattttacagctattaatattgttagatacaatggaaatattatagccaccaaagctcctgctatcataagcgtagttactatccaattggttttgtttctcctcatagtactttttcctccctcttttcaaggactctaagctgaaataatgatattgctacaattacgatgaagtaaataacagcatttgcagattgatatgcaaaacttccttggttaaatcctccgttataaattacataagatattgattgagtaacagttccaggtcctcctcctgtcatagctacaacctgatcaaataccattaaaaatcctttcatacataaaaccatgttaattgtgaaaaatggtgctattaatggaaatgttatgcttttaaatctttgccatgaaccagcaccatcaatatcacaggcttcgtaaacatcagtatcaattgtctgaagtccagataaatatattattgtattaaaggctattgattgccatgctgctacaaacactattccaagccatgcaagcttttcatcacctaatatgtttttactaagcatagaaatgttcatagtctctccaatgtttggtataacatgagcaaatacaaaattgaatataaatgccactattaaagttcctaatatattaggaataaaatatattgactttaaggtattttgaaatttgatttttgagtttaaacctacagcaattaaaagacttaatatgtttactataattgtagttataattgcaaatttgaaagtaaaaatgtacgcatgcataacattactatcttgaaatactgcaatatagttttttaatccaacaaaactccaatcaccatatccttttgaattggtaaaactataaaatacaccttctaaaagagataatgtatgaaatataaagaataacaaaactgctggtatagtcataatataaaaagcttttttctttttcaaaaccttcagccccctattattttttcatttgacaaataaatattattaacatataacataggttgtcctaaaattagtctattttcctaaaaatattatttttcatgtttattaataaatatcaagctacggccatcttttaggacatccttatgacttttattttctcttatttattgtttgctactggctttatcgtattcagtatcaagttgttttaagaattctgccttatcttttttactatagaacccttgaactaaacttgctgcatcaaatgagcttggatagtagtgatcagggaaaacaccaatttttccatttttaaagctttcttgtacatctgttacactttgatcatcttgtgtcacatctttaactgcagaaaatgcgaattgatcttttatatatttttgagcattctccttttgagtcataaattctatgaatttttttgcttcatcagagtgttttgacttacttgttattccaaataacacatctataccagatactatattatttttagatggatcattacttgcaggtaatgggaacatgcctatatttatattaggatttgctttttttatttcactaatagcccagttaccttgtaaatacattgctgatttaccttgtgcaaaggctgcattaccatcattgtatgatactcctaaaatatcttcttgcccaagagttcctatagtctccatcttgtccactatttctctatgtgtagcttcaaaagttgtttttcctgcttttttatcagctaagaaattactaggctccaagtcactagctataacattccagaaacacattccagtccatgcatctttaagtgtcaaataaagtggtaattgacctgcatctttaatttttttcgatacagccataaattcatcccaagttttaggaatttgcaatcctagctttgaaaatatatctttattgtataaaacgccatcggcattagtagcatatggaactccatatatctttccgttatcattacttgctatgccatgaagcatatctaaatatggtttttgtatgttttcaataatgccatcattagtaagatcaacgagagcatttgcatctactagtgcaccatagtttacatcagcacctaaagctactagatcaggcatatcatttttagcaagtcttgtttttaaaacagtaccagcatttgcaggtgaattaattgaaatttcaatatcaggattcttttcttgaaattcatttgctaatgattgtaatattgttttattttctgccttagttgaaaataactctaattttacttttccattttctgtgctacctcccttagaaccacatcctgctaataatgaagttccaattactgcactaatagtaattgacattagtaattttaattttttattcatttctcttccccctactttgtaatttcagtatacgattacgtagatttaatattatattaactatactattttaggcacatcagccttaaaaagtacattttaatatctttttctattccttaatacttaatcgtttacgtaaactataaaaatttacgtaatatctttctcaaatcttatatgaaattatattacaaagttttaaacttagaattgtatatagaaacttgtaatatagcttcatactattctataaataatcattgaaatcttatattcctataataatttatatattactattaattttctacatttaaatcataactgagtatttaatatcttatagctttaaatgtagatttattagtgcagtctatatatctttaatctttttaactgtctctctttctataatttcaaatggcattattatgctttcaactttttcgttgtaggatattctttttattaacatttcaacagactttttccccatatcatataaaggttgtgctactgttgttaaaggtggatatgacatctcagctatatttgtgttatcataacctactatagatagatcatctggtacttttaaaccattcttatgtgctactgataatgctccaacagcacaatcatcagatgccgcaaaaacagctgtaaatttctcacctgtctctagaagttcattcattccttcaaccccatctataaatccaaaccctttttctttaataagatttttctttatggatatgttattatctcttaatgcttgcaaaaatccatttaaacgtggcactcctgctatagggtcttcagtcggtccagatataattgctatctctttatggccattttcaattaaatatgatgttgctgaataagcagcctgataatcatcaaccttaacataaggcaatgaatacttgtacgataatcccgaaacaagaactgttggaatatgtgagtctattattcttttgcataaagtatcatctggaggtatgctgcaaacaattaatccatctacctgtctttcagataatacctgaagatattctgacattcgctcccacttatctccaccattacagattataacgctgtaattattgcgctgcgcaaaatcttctattccatttaaaatttctacataatatgtagtgcttatcttaggacgtaacactccaatagttcgtgtttctttaaccttgagatttctcgcaattgcatttctttgataaccaagttcatccatagcttcaattactttttttctagtctcttctgaataaccatctagattatttattatcctagaaactgtggcaacagaaacattggatttcttagcgacatctttaattgtgggtcttttaatattactattcataacatattcctctttttcagtaaacgtttaagtaattaaatcttatcataattggatttaattgtctatatcttcgtataatattttttatatttttaatttctatataaaattagctgtttttatattatacgtttactaaacaatgaacgcttaaatcttcttacaaaatatggctttaaacttcacttaatatcttgcagagctatcaattcaacactatactatattatgtgaagtattttgggcatgtgctaaagcgtattcaaaatagcagtcaatagccagtctattttatatatagagtctagactcttaaaatgcaacatttataagaaattacgagtttctaaaggaaatgttttagagtccaagcataaaatattcatagcaaatttggacatgttatttcatgtatctaataaaaactcggcgaaatgagagggagatttatgaacaaaaaagatatattagaattaaaaagacgtttaaaaaaagatgactgtacgtttactaaaatgtgtggttgttatgtagatggtcaaaaagatattgtattaaaatttaaagaaacttttttaaatctaagagaggaggaattctttaaatatttagaaattgccaagaaaacactatctggaacagttggaaataacattcttgaacttaactttcctcttgatgaagaaggcataggcggcagacagctttccttaatggagctaaaaaaaagtaaattaaaagatgattctatgctcgatagcttttataaaatgattataaatagttatgaatatactggtaactttctaatactcgtttttcacgatgcctatgatgttatgacaaaaactacggataactcaaaattagatgaatctgaagaggtatatgaatatatattatgtgcaatctgtccagtatcactttcaaaaccagctcttggatatcttgaagatgaaaatcgaattggagctcgtattagagattgggtagttggtccaccagaccttggatttgtatttccagcatttatagatcgtagtactgatattcattctattatgtattacacaaaagatgcaaaagatcctcatcctgaatttatggaggaagctttaggttgtagttcaaaacaaacagctactgagcaaaaagaaacattccaaaatataattcgtaaagctgttggaagtgatgatgaaaaatcagagcatttatttatggaaattcaagaaaccctcaatactatagtagatgatcatactactgttaacggcaaaaatgctgaacctatagttttgagtaatgataatattcaagatattttaatcgaaagtggagttcctgaagagatcactgcaaagattgaaaaatcatatacagaagcatttggagatactccgcctgtagcagaaaatttaattgataaaaaagcacttgcagcaaatgaacaaaggaaaaaggaagaaaaacttgagaagaaagtacgcatactagaagaaagacttgaaaagacaaaactggatgctttatcagattcagaaaaagaagctgctttagaatcagaaactgaatcagctttgaataagatcttagagtcagagcctaattctgctttaaagacagaatctgataccatcttagaagtggcttctgactctaatttagatgaaaatcttgattcagaaacagcatctgatgcaaataatactgaaaacactgaaatagaaactgagattagcgatgctccaaattatgatattgtacttaatgtaaaacctcaaaaagtatctcaaataaaatcacaaataatagacggaaagaaatgtattataattcctatagatgatgatgaacaagctaaagtaaatggcgttaatgctttgctttaacttactgcaaataatacttttctcatttaaatagccataaagatcctgattaagggtctttatggctattataatctatatataattcagtaatgagtttatatttaaaattcgggaagttatatacctgattaaacctaaaatatagaggcttgattctaatacatataatatgattcaatattcattactttatatacattccaccaggagtttctgataaattaactatgatatttttcttttgagtatacgcttctaatataactttgtgagtttccctgcctataccagattctttgtatccaccaaatgttgcacctgctgggaaagtattataagtgttaacccatatacgtccagtccttattcctttagcaactcttatagcacgatttaagttagtagtaaatactccaccacctaagccatattcactatcatttgccatagcaatgacttcttcttctgtcttaaatttaattacaactccaactggcccaaatatttcttctctagctattctcatatcattagtaacatctgtaagtaaagtaggtttcataaagtatccattcttagcatcaccctcaatgaatctttcccctcctgtcgctacttttgctccttcttttttacctatttctatatatttaagaatttttttaagttgagattcactaacttgcgctcccatttgagtattaggatctaatgggtttccaactttaactttttcaaaagcagcaattgctttttccataaattcatcataaaaatcttcttgtacaaatattctagaacctgcagaacaaacttgtccttggttaaataaaattcccaattgaataccttctaatgcaatgttcatatttgcatcactaaagaaaatattagctgactttcctccaagctctaaagttgcaggaataatacgtttagccgcagcaagtccaatttgtcttccaacttctgtagatcctgtaaatgctaatttatcaagtccttcatgattttgcagatattcaccgctctttgatccttttcctgtaataacattaattacaccactaggaacaatattttgtattagtttcataagctctaatacgctcaatgaagtagtacttgatggtttaaatactgaaacatccccagctgctaacactggagctaacttccaagccgccattaagaatggaaaattccaaggaactatttgccctacaacaccaattggctcacttaatattaaatttaaagtattttcatctatcattgttgcagaaccctcatcagcacgaataacacctgcaaaatatctaaagtgatctgctgctaatggaatatctgctcctgttgtctctctaattggttttccattatctaaagtttctactgtagctaagtattctgcgttttcttcaataatatcagcaattttatttaatatatttgctctttctacaacagtagttttgccccatgtagcaaaggcttgtcttgcagaattaacagcatcatctacatctttttctgtagcatctgcaatctcagctaaaaattccccattagctggattataagtctttattgtagctccatctgaagcatctctccattctccattaataaataatctatatctattttctaatttaacattcataataaacaccttttttcctcatataatcgatcttttataattttattatagcactaaattaattgcattcaatataaaataattatttaacaataataattatccatataattattgctaaatattgaaattacatggtgttcctgtataatattataaattttttttatttaaagacaaaaaagtataatataaaacaaacactttgttaagaatttattttatattatacctttcatatttgaaaaaggtgctatatttatttcttattaataattaaaatttagctctcttactctcttttcctactcctttattaaaatgtctaatgtatgtgcacttgctccaagcaactctggtctttcacatgtagaaatatgatagttaataaaaagcttaaatgtctcttcatccatagcatttaaaacagatctcatgtaattcgctggcccatctgctgaaattaattttatcctttttagtcttacttcttcatttaacttattgatatcttcaatccttacataatcatataaatcttttggctcagatataacatgaaaatcatcagtaagctttccattttcaatagatgaacgaatattattttccttaaaaccatatgttattacgctatattcattcatgcaataagctactaagataactcctccaatttttgttactctcttcgcctcttgtaaggcttttgctttatcctgaaaattgtataagtgatacatcggtccaaataccaatgtcatatcaaatgtattttcttcaaatcttgataaatctaatgctgtcccttgatatgcttttactgaacttccttttgatttcaaaatacctagattatgctttacaagctcaattgctgtaacatcatacccatcatttgctagctccacagagtatcttcctgttccagcaccaacatctaaaattttggaaccattattcttttctagatactcatgaatatatttcatagaagttaaaaactcaacttgtgcatattttctagttaatcttttatcttcacaaaatttattatagtatttctctaattccattgtcatctctttacgttcctcacctatcatttattagaaattattaaatataaatattaatttctttcctgatttctaacaactattatactatatattgcaactattaaaaatatagatttattctttaaatatctacaaataaaaatgcccccaagaacctaattcccagattcttgcgggtttatgatgaaatagaaatactctctttacagatacatatctattagaaaaataatattttataagtcaatataaatataattccctattatcttataattgtcactgtattttccttcaatatttttttctctggtttaataccatctatatagccaatacaaatagacccgcaaaccttatgtttttctgaaattcctaagcgtgtaagtaactttcttacattttcatcattgtcaaaccatgttaattgatttatccaacatgctccaagttccaagtaatttgctgctaaaagcatattttctatagcacaagcactatctgccattgcattactatagttagactcattcgatactataatcaaggttggagcattgtaataaaaattgtagtcatctttcttcgatgcaactttacctgcttttttacttttataggtattttcatcaacttcaagcttttcaaaagcttctttaatatatccatttaactctaaaagaatttctttattttgaactacagtaaattgccatgtttgagagttacctccacttggtgcatgttttgctgaatctaagattgtaaatagttcctcatcttttatttgttcctctttgtatcttcttatacttcttcttgattttatattttcaattacattttccatattaatcctcccttttaataattatattctaagtctaattcaaataaaatgctaatcttggatattagaaaagtgattaaaaccttgcaatcacttttctttgcctatttaatgatatctaaagatataaattaataaataatgcgccataacctatgccatatcaactctttctttaatattctctcctcttttagaatataaaagaaataaacttaaccctagtgcaactacaaagaaaattgtaaaaaatctgaaactggaatctatagacttaactaaatttccacttatatttacattagaaaagcttcctaaacctataattgccttagagactacatccgcaggtataataacttctattgttaatatggctaatgtctgacttaaggctttaccaacattcattatagtataatgcatccctgatgctgaaccagattgttctttaggcactgctgacaatacagttttcgctaacgacggccaagctaagccatttgctattgataataatattagtggtgtaactatagctttaactgatagctctcccccaagatttccaagaaagaatatccctataataagaaatacaattccaaatgtaagagtctttaatgatccgatattatctacaagtttacctgcaaatggacctaatataagctgtggtacagatagtgaaatcattaatagccctgacatagttggacttaaatgtaatgcactttgcaaatatatactcaacaataaaggtaatgaaaaatatgcaatacaataaaataatgtaattataagtccaattgaataatttctgtacaagagcagcttgaaattaaataatggattttctacgcgtaattctgtgattataaatgcaacccataataaaattgtaactatacatagccctaaagtttcatatgatacccatcctaatgattgtccttctgaaagtactatcatcgttaatattaaacctaagctaaatgttaatatcccaatccagtcatttttttgattaatattaggtttagtctcttccattactaaaaatgctccaattatgcaaagaagtacaaaaggcactgtaataaagaatattgatctccaaccaaagctgctaattaaagcaccaccagctactggtccaattattgctccaataacccatgaagtagcattaatgctcaaggctagcccaagctcattactatgaaaagtcttaattatagttggagttgcagttgccatagccaatgctgctccacctccttgaattaacctatataaatttaaagtaaatcctgagtctgcaattccacaaagtattgtaccaactgcaaaaattataagtcctaacatgaaaatacgctttgttccaactgtatctgcccattttccagcaggtaatattaaaactgtacttgctataatataacctgtaattatccataatccagatgttacagagatatttaatccctccatcatcttaggtaatcctattattactatagttgaatctaaatttgtaataaatgaaactaatgtaacaacaagtagaatgctccatttgtgtgatttagaatttgtcatataatctccttatttataaatggaataaattttcgagtgtagataaacgcttatatgattcatcccatcgaagccatttaattttgttttctatacatagtttacaagagattatatatcatgtaaaatgattatataagatatcaagattcacttttagtgatttatatattggggtgataaaatggaaagtagtgaattaagaattttcagagctgttgctcaagcaggcagcataacaaaggctgcgcaggctctgggatatgttcaatctaatgttacagctagaattcaacaattagagtctgatttaaatacacaacttttttatagacagcgaggtatgattttaactcctacaggtgagaaattactagcttatgccgaaaaaatcatttatttattggatgaagctgataaagccttaaatgattgttgcgatccttcaggaagtttatcaattggtgctgttcacacagtatctgcaatacgtcttcctgaaatcttatctcagtatcataaagcttaccctaaagttgatctgtctcttataacaagtcaatcagatgaacttatttataaaataaaacacttccagttagatggagcttttgtcaaagctcagtcctttagtgatgagaatatcgtaagtgaacttgtagtcgaagaaaccttagttctaatatcaagtcctaaatatgataatatagaagatttatattcaaaaccatttttgatgagtacagcaggatgtcctaatagaacacagcttgaaaactggctcaaatccaaaagcattcataatattcgatatatggaatttaataatttaacttctattattgaaggcgttattgctgatcttggtgcatcctttgtacccaagtctactattgaagattataaaaagaaaggacttctaaaatcattctcagtacctgataaatacaatactacaaaaacattttttataaggcggaaagattctttaatgactagttccctttcaaaatttatcgaaatgattgagttaaatacaccctataaaagaacttaaaatattagctaaatcccccatgaaaaatcagaatttcgtggggaatagttatgaatctcacccttgcacgtaaatcaaatattaagtcgtatttttctttttgagctaaaaagaaaactcactaaatacactttcgcctttacctaaaggctttctatctccttcataaaaaccgaattcatcatcatcttcatcatcagtaacctcaatatccgtatttttcttcggcttcttatttttattcatcactaaaggtacaggtatattgcctttcggtacaccattaattttccccgtgcttattatgttcttattatcgctgattccttcatttttaatttctatattattcttagtatcaattgcattctccatattacacatattgttgtctttctgctgttgcttttcaataatttcattgccaagctcttcttcaatatcatgtttttcatcatagatattttcaacacttttagtctcttcgctttttaacttactatcctttttacccattttttctttatcctcagtaatatctttaaccttttctttgatattttgatgttttgcaaaattctttactttataaacattttcttcaataacttcaaccatttctagatctataaatgtatctaatgccaattttacttgactttcatccctattaaattctatagctaaagtctttaatgtatatggaatgctttttgacatatataagttgccatctagattaactctcccagctaaaattacaattctagtccagatataataaataacatctctttctggcattctatctattattttaaattttgtatcatcatacatatcaactctaaatcttacatatcttctctctttcatcttaattgctcctcctaaaaatttttatttttctattcttttcaattaagatatatgtctcaattcataaaataacagaatatctataaatttttttctaaaactttttgaaaactaaaataaccttagaaataactaaaaaacacgaaaatctaaattttgatatgctccctttatagtagacagttaaaataataaaactgtttctataaagggggtattttaatgtcaagaaaaacgaaatgttctctggaagagaaattgaaaggaattaaagaatacctatcaggagaaaaagcagttatacagatatgcgatgagatgggaattcatagtgccacatt

SEQ ID NO: 97 - DNA, 23288 bp, Clostridium beijerinckii
cgttattaatatggcattttttgtaatgaaccttgataaaaaattgagggtcattctacgccattttacaaattactatattttggaatactacatataaatatagggggttttaaagcaccccctacatagagttagaaatccaagtagaaattatgttggaagtttatacgggtaaaaaaagtatatttggaataatatatgcatacatatttgattcaatcgcaaagtccaagctatatggaagagaaattgcaaaaaagtccctgctaaaagccattgaactagcagaaaaagaccacattgtaatgtgttttgttgaattagccccacatatattaccattactcgaatctattaaaaatgaaagtgcgtatgtaaaatgtttaatcccaaagtgcaaagaatataatcagatatatctaaaaagatattgtaatttagaaaaaatagagttgactccaagggagattgagataatgaaattggtatatcatggatataagcaatctgagatttcagataaactaaatattgctttagttactgtgaaaaaacatattgcatctgtttattgcaagttaaatgtgagaaacaaaacaatagcaattaatcaattgaaagaaaaaggtataatataaaatgatacaaattaaatcaaaattatactttagtataatacacaaatcatttatatgtatgtataatcatctcatgagatattaataatactttaaaactgaatagagttataaaagccagcaatttttaatattttatttattgagtgttggctatttttattatagattgctaattgaaggatgggggaaaagagagatgatcacagattttggtaagatagcaagggaactttttaatttggttggatcagaagaaaatattttgtgtgtagaaaattgcatgactagattaagattgagattaaaggacactaaaaaagtggatgttggaattttaaaaaagatagaaagtgtacgtggcattgtagagacaagggaacaatttcaaattattattgatggtactgctgcaagaatattaattagtgagtttattaatatatataagacaagaaagtaatattgtggtagcagtttgaagatatagtgatttaaataaaaaaatatggaacaacctctagctaagaacctttgacagtttatttagtatttctatttataatttcatataaacagaaatataaataaaaagagggccagcaaatcttttatactttagtatattatgatataatagctaaggatatatttaaaatggaggattttgtaatgaaacatataaaaactataaacaaaacaaacattaaaaatagtttatgtaagccaggatgcaaagaatgtgcaaactcatgtcaatcagcttgtaagacatcttgcacagttgcaaacttagaatgtgaaaactaataatcttcaagcagtaactatatagttactgcttactttatatgtttaggaggaaaaagaattgtctttaatacataaatttaaacaaggcgaaaattattttgttttagatgtgaatacaggagctgttcatgttgtagatgaactagtttatgatatattagatgatagccaattaagaaataagaaagaaatattacaggaacttaagggaaaatataatgaagaagagatttcagaggcttatgatgaaattcaagagttagctgaagaaggaattttatattcagaagatcaatatgaagaaatagctcatagctctatggatgatagagattacataaaggctatttgtttaaatgtaattcatggatgtaaccttagatgtaagtactgttttgctgacgagggtgaatatcatggacatggcggagtcatgagtgcagacacagcaaaaaaagcaattgattatgtgattaagagaagtggaccaagaaaaaatatagaaatagatttatttggtggagagccaactttaattatggacacaataaaagaaataattaagtatgctagggataacgaagaaaaatggggaaagagagtaagatttacaatgaccactaatgctactctattaactccagatatgatggattatatggataaagaaatgggaaatataattctttctttagatggcagaaaagaagttaatgataatgttagaattaagccagataaaagcggttcttttgatgatatagttccaaatataaaagaaatgattaagagaagaactaaaggaaaaacttattatgtaagaggaacgttcacaagagaaaatacagatttttatgaagatgtaatggcaatggttaatgaagggtttagggagttatctatagaaccagttgttttagaaaatggacatccactttcattaagagaagaagatatagatacaatctttgaaaactatgacaagctatatgaagaaatggcaagaagaaaacgagaaggaaatgatgaatttaaattctatcattttaatatagaccttcaaggtggaccatgtgtttacaagagaatttctggatgcggtgcaggatttgaatatgtagctataactcctcaaggagaagtgtatccatgccatcaatttgttggaaaagaagaatttaagttaggaagtatacacgaagatacttataatggagaattagctcaaaaatttaagaaagcacatatatataataagcctaaatgtagggagtgctgggcaaaattctactgtagtggtggatgccaagctaacaattttaattttaatggggacatgaacattccttatgaaattggatgcaagatgcaaaagaagagaattgaatgtgcaattgcgctaaaagctgaagaaaattaatgtttatataataatatactaaaaagaaggggaactccattgcctttgctactgagagaatcttatttgggacatattgataaaagctttaacaatctatacttgtttcttaaattaattaaaataagtatagatgaaatagcttccacttagtaatttccatagatgatttttttatcgagcacttcgcaagaggaggtctctttttatataataaaattgatataataacattttaaatgcacattttggaattaaatatagtatatattgcaattgaagctcacagcgtttcggttctaactgagaaatttttataaataagatttttaatgtaaatctactattgcaatgtataagaatgtaaggagaatagatacttggaagaatacattttggaaaatgatttgagattaatttataaacatacagattcagaactatcatcaatttgtatttctttaaatgcaggagctggagttgagaatgaaaagtttggagtagctcatgcaactgagcatatggtttataaaggaacaaaaaatagaactgagagagaaataaatgaagagctaagtaacatttttggatttaataatgctatgacaaactatccatatgtaatctattatgggactctgctcggagaagatttacaaaaaggtgtggaaattttaagtgatataataattaacccggaatttggagaaaatggattcaaagaagaaatggatgtcataaaagaagaattgaaagaatgggacgaggatgtagaccagtattgcgaggataatttgttttttaactgcttcaataatagaagaataaagtatcctataataggaacatttgatgatcttgagaatataactttagataatattaaagaattttatgataaatattattttccgggaaatacttcaattgttataatttcatcagtaaagtttgatatagttaaggaaattatatataagtattttttagtatggaagaaaaagaatattattcaagaaggtattagtggacctggtaataaaaaattaatagaatatgaaaatcctcaaaagggaacttatagcaatgtaagagatggaataagggcctgtaaagttgaaatgatatttccaattgatgatttgagtgaaaaagaaattaaggcacttagaattttcaatcaatattttggagatggggttaattcaattctctatgatgttttaagaactcaaaatggtttagtatatgatgtacttactaaaatttcaaatgagaattatataaaactatataaaatcacatttagtacatcagaagaaaatgtaaataaagctatatctttaatagaaggatgcatagcaaagttagatttattgcaaaagaaacttgataatgatcagatagaacgtttaattaagagttttaaattaaaaagattatttagagaagagcagagtataatactggccaaagagcttgctacatatgactgcatgtttggagattataaaatctatattaatgagattaaaggaatggagttactaacaaaagaaatgatttttcaagtaggtaggaaagtactgaagaattttacaacacagataattgagagagcataaaaggaggcagaattatgtacagttttaaaaatgattatagtgaaggcgcacactcaagaatattaaatgcattagttgaaacaaatttggaacaaaccgatggttacggtactgatcagtacacagaaagatcagttaatctgctgaagaagaaaattgatagagaagaggtagatatacatttactagttggtggcacacaggttaaccttacagctatatcagcttttttaagaccgcatcaggcagcaataggagcagatacaagtcatataaattgtcatgaaaccggggcaattgaagcaactggtcataaagtaattacaatgagaactaaagatggaaaacttactccaaatttaattcaaaatgttgttgattctcatagcgatgagcatatggttcaacctaaattagtatatatatcaaattctacagaacttggaactctatatacgaaagcagagttaattgatttacatgattgctgtaagaggaataaactgctattatatttggatggtgctagacttggagctgcacttgtagcggaagaaaatgatttgactttagctgatatagcaaaattagttgatgcattttacattggaggaactaaaaatggagcgctttttggagaagcacttgtaatatgcaatgatgaattaaaagaagattttagatattttattaagcaaaaaggtggattattagcaaaaggaaggttgcttggaattcaatttgaagaattattcaaagatgatctgtattttgaacttgcaaaacatgcaaataaaatggcacttatgttaaaaggcgcaatagtaaatgaaggatataagtttttgactgaatcttttacaaatcaacagttccctatattccctaataatttaattgaaaagttaagtgagaaatattcttttaatattgaaagagtaattgattctaattatactgcaattagattagtgacatcatgggcaactaaagaagaaattgtattagaatttatcgaagatctacatctataaaaaaggcatgaagtattaactagaatcttttaagaacaattaagtattttttaaaagattaagaaaaaaggcacaagtgtagtatatagtatttaatttatgaaatagaaagtatgttttaagcttcatatcgtttgatagtcgatatgaagcttttatccatggttagctatatttgaaattagattggagcggtatttttgaagttaccattattagaaggattacttaaatacaatgatgaagaaaatctacttctttccatgccaggaaacaagggggggattggatttactagagatgaaattgggctggagtttgttaatagaatgggatttttagatataacagaggtcgacccattagataatttacattatccagaagggataataaaggaagcccaggagctattagctaaaacgtataaggctaagaaagcctattttttagtaaatggaagctcatcaggaaacttagcagccatgttttcagcatttgatgagggcgatgaagttttagttgaaagaaactgccataagtcaatttataatggattgattatgagaaagttaaaagttaaatatatagaacctattattgatgatgaattaggactatttttaccacctaataaagagaatatatataaagcgttagagaattgctcaaaaccaaaggggattataataacatatccaaattatttcggaattacatatgatatagaagagattatatgtaatttgaagggaataggattaaaagttataatcgactgtgctcatggagctcattttggaataaataaaagattgccaaagtctcttgcgagtttaggagattatgtggttttaagtgcacataaaactttaccagctctaactcaaggagcatatctcttagtaaatgaagagaatgacataatagatttttacataaagtcatttactacaacttccccatcttatctgataatggcatctttagattatgcaagatattatttagatacatacgggaaagatgattatgataaattaataaatgaatctgaaaagtggaagaaaaaaattaataaactaggaaaagtttatatattaagtgaaagtgacttagataagcataatgatagaatagaaggatacaaaattgatcctagtagatatatagttattcttcctaaaggatataatgggcataaatttctagattatctaagagataataagatacaggctgagatgagtttttcaagaggagttgttttaatcctgtcaccatttaatacagaagaagattttaaaattatatacgaaactattttaaatttagatatgagaaatatgtctagagaaatagagataaaatattctagaaatatacctattaaaaaatttgagccttatgaaacttttaaattaaaaagcagatggtgtgaaatagaaaagtgtgaaggtttagtagctaaagaatcaataataccatatcctccaggaatacctttggtttgcccaggagaaataatatcaaaagatgttatagcaatagtaagggactatattataaataaaaaaagtataattggagtaaataataacaaaattctgattttagatataaattaatataaatgatgaatctataatttactataatcctattggtataagcttaaatattgtgttaaaatatatctatttagaataatatatatgatgataatatgcggggagggatagacaattatatatggaaacaaatattgtaaccaaaccaaagaataaagttaatgtgaaaaagcctaagaattataaagttgttatgtataatgatgattatacaacaatggaattcgttattaatatactggtagttgtatttaataaaaagttaatagatgctgagaagataatgttagatgtgcatgaaaggggtaagggaatagcaggaatatatagttatgatatagcagctactaaagtttcaactgcaatgtcaatggctaaagaaaaaggctttccgtttaagcttactgtagaggaggcgtaaaatatgaaaattacgaatgaagttaatttgatattacttaaagcataccaagaagcaaaagagaaaagcagcgaatatattacaccagagcatttactgtatgctgcaacttttgataagaatgtagagtatgctattaaagaatgtggtggaagtttagaaaatttaagatataatttggcaacttacgtgaaaacatatataaataaaattggtcaaggagaaccacaagagagcatagagtttcaaagagtcattttaacagcaaatgaacaaattaagtatagcgggaaagatgcaattgacgtagatcatatactctctgcaatttttaatctagaagatagttatgcacgatattatctagagcaagaaggcgttacaagaagagatttgctatattctttgtgtcatagtatagatgaagatactcgaaattcttatgatgatgaaatgcaagaaaattttaaagaagatgagaatgaatttactgagaatgaaagtaaagaaaaagtggagaagaaaaaagaagatgcatttcttaataagtttacaatagaccttattaagaaagctacagaagaagaaaatgatccattgataggacgaaaagatattttagaaagaagtatacagatactctgtagaaggataaaaaataatcctatacatgtaggtgagtctggagttggtaaaactgctataactttaggacttgcaaagttaataagtgaagacaaggtgccagaaaaattaaaaggaagttctatgttttctttagatattggatctgttatagcaggaactaagtatagaggagattttgaagaaagaataaaaagagtcttagatttgattagcaaacaagataagccaattgtatatatagatgaaattcataatattgtaggtgctggagcgttaaatggtggcgcattagatgcgtccaatttgttaaagccttatcttacagaaggaaaaattagatttattggagctactacttttgatgaatataaaaagttttttgaaaaagataaagcattaagtagaagattccaaagaatagatgttaaagaaccatctataaaagaagctatacaaatattagatggacttaaaaagaattatgaagaatatcataatgtaagttatacagatgaagcaattggagatgcagtaactctaagcgataagtatattaatgacagatatctgccagataaggctgtagatattatagatgaagctggagcttatgttcgtatgcataatgaagatatgaatgagcagattatagttgacagaaaaactattgaggaaataatatcaaagatttgtaatattccaaagcaaactgtggaaagtagcgagataagttctttaaagcacttagaaaaggacttaaaggaaaatatattttcacaggataaagccattgaagaagttgtaagatgtataaagatgtctagatctggattaaacgatgaagataagccagtagcatcgatgctttttgttgggcctactggagttggaaaaacagagattgctagatgcttatctaaaactctaggaatagatttgattagatttgacatgagtgaatatactgaaaaacattcagctgcaaaactcataggatcacctccaggatatgtaggttatgaagaaggcggacttttaactgattcaataagaaaaacgccacattgcgtattattactggatgaaatagaaaaggcacacccggatattttgggtgtattgcttcaggttatggattatgccacacttactgataataaaggcaggaaagctgattttagaaactcaataataataatgacctctaatgctggagcgagaaatataggtaaaaagcttattggtttcggagatagagaagtcaaaggtgaagctataatggaagaagttaaaaagttcttcacacctgaatttagaaatagactggataaaataatagtatttaatggaatgactgatattatggcagcaaatgttgctaaaaagcaattaaataactttaaagataaattgaattctaaaaatgttgaaatagaatttagtgaagaatgtgtaaatcacattgctaaaataggaacatcagaggaatttggggcaagagaaatagcaagagttatagcttcgaatataaaaccattacttgttgatgaaattttatttggaaagctaagcgaaggtggaaagtgtgtaattgattttgtaaatgaaaaatttgagttgaagatcaattaaatctacttaaagtaatgtgattcattattatatatgaaaaaataaatgtaaaagagtcctagtcctatgtaatatcatctggagagattacatgataattaaatataaactatataataacatgtttttgaataaaaattatgaagacagacataatattaaatgacaaaaagaaatttttaagcaaaaagaggaggtgaactattgcaaagttattttaacttgagcaatggaacattagaatggaagataagacattaatatgcaaagattgtggaagagagttcgtttttactgtaggagaacaagaattttataaggaaaaaggttttgaaaatgaaccagtaagatgtcctgactgcaggagagctagaaagcaacaaaacaatagaagatagaaagtaataaagtttctattgattgagtaagaagcataagaatgattaaatcttatgctcctttttatttttatatgatataaatatattttttagggtcaattttgattaattcaatagaataatctgtatttaaataaaaaaatataaaaaatatattgaattgtttgtacttttgctagtataatataaagaaagatttagataaagaacagtggaaaatttattcatatgatttttttatttaaaattttatattagaattgagactaaattaaaaataatattttaaagatagtgataaggaatagtatatagatggtaaacttttaagagagctagagtttggtggaatctggtaagtataatttatagaagcagcctttgaattttataactgagaaataaaaattctgagaagataagaatttttaattaggttataacgtgttcctcacgttatagaggtggagtatttatgtactctaactgagtgaacaattttttagttgtttattagggtggtaccgcgaagtagttctttcgtcccttgtgtgggatggaagactttttttatttaaatatattaaaaacaagggggttattttcaatggaggaaatacttgaaatattagaaaagaatagtagatacagtgatgaacaaatagcaattatgacaggaaaaactgttgaggaagttagagaagcgattagagactatgaggagaaaagtattatagcaggttatacaacacttataaattgggaaaatacaggtagtgaaacagtgacagcattaatagaagttaaaataacacctcaaagaggcgttggttttgataaagttgcagaaagaatatataaatttttagaagtaaaagcatgctacttaatgtctggaggctttgatttaacggttattgttgaaggaaaaaccatgaaggaagttgctctttttgtatcagaaaaactagcagttcaagaatatgtattaagcacaggtactcattttgtattaaagaaatataaggaccatggaaagatctttaaagaaaagaaattagaagatagggaggcaatatttatatgaaattagaagacatgattttagacaacgtaaaaaatatgcctccgtcaggaataagaaaatatttcgatataataaatgaaatggaggatgttatttctctaggtgtaggagaaccggattttgtaactccatggaatgtgagagaagccgggatatattctttggagcaaggtcatactcattattcatctaatgcaggatttattgaacttcgtagtgagatatcaaagtaccttcatagaagatttaaccttaactataatccagaggatgaaataatagttactgttggaggaagtgaaggaattgatatagcacttagggcgttagttgggcctggggacgaggttatagttccggagccaagctttgttgcatacaaaggatgtactgcatttactggagcaatagctaaggttttgaatcttaaagcagaagatgaatttaaacttacgcctgaggctttggaaaaagcaattacacctagaacaaaggtagttataataccgttccctaacaacccaacaggtgcaataatgactagagatgaactagcaggaatagtagaagttcttaaagataaaaatattattgcaatttcagatgaaatatactcagaactctgctatggagagaagcatgtttcaatagcatcttttccagaaatgagagataagactttagttataaatggattttctaaatcatatgctatgacaggatggagacttggatatatctgtggacatccgattctaatagaagcaatgaagaaaattcatcaatatgctcttatgtgttcaccaacaactgctcagtatgcagcgattgaagctttaaaaagtggtgataaaagtgtagaagaaatgtgtaaggaatataatagaagaagaagagttctattggatggatttagaaagatggggttagagtgttttgagcctcttggagcattttatttatttccaagtattaaatctacaggtataacatcagatgaattctgtgaacaactgcttataaataaaaaagtattagttattccaggaaatgcttttggtgattgtggagagggatttataagagtttgttatgcgtcatcaatggaggatattatggaagcactgaagagaacaaagagatttcttgataaattaaaagagaaataataaaaaaaggagtggtttaagtatgaaaatacgttagattactcctttaatatagacttagaaaagagtgaaataaaattatattaataaaaaaagtttgtaaatatatatagcataatttatactagtatgggcatagaatggcttaaactgaagataaatggcatgtagtattgataaatattatagtgaaatcaataaacctatgaatattgacatcatattcctaatatattattataagtgtggaagcgataccataaatagttcgacttaaaaataacttggcttaaagccttagaaattaagaattcaagttataaattaatctaggatataataatagtatttcacgatttagttttaataatgtaataaatttggatgaattatgaaaaaaatttgacgaggtggggtgttatgtcagttactataaatgatattgcgaaaagggctaaagtatcctcggcaacagtttcaagagttctcaataattcaggttatgtaaaagaagaaactaggcaaagaatagtagtcgcaataaaagaaatgaattatacaccgagtgcaattgcaagaagtttgtcgaaatgcgagactaatactataggagttatcgttccagatataactaatgcatattttggagaaattataaaaggagtaagtgagagggcagaaagaaataatctgaatataattttatttaatacagataattatttagagaaggaagtgcgtgctcttaaattgcttaaagaacaaagaattaaaggaattataatgaccccaggatttggtgaagaaaaattcaatgaaaattatattaaaacaataaatactttaaatattcctataatattagtttcggctgatgttaaatttacaaagttaaatggagtttttgtagataatataaaaggtggatttgaggcaacaaacctgctaattaaagaaggtcatactaagattggaataatgacaggattattgagttcagaaccagtaatggatagattagagggctataaaaaagcattaaaagaaaatgatattgatttttgcaataagtatgttttatatggagattttaagatagataaagcatatgagttgactaagaaattatttgaagaaaaagaccgtcctacagcattggttgtttgcagtaacatgatgacaatgggtgttataaaagcgttaaaagaagataataaggatattcctagagacttggctatagtgggctttgataagattgactttttagacatcgtaggattaaatattacatatatggaagattgtccgattgagttgggcagagcgtctatggatatgctggttgatattatcagtagtactgaggatgattgtgtgagaagaatgattattgcaccacaaattgtagttaaaggttcagagaaaaagatataaatttatatatacgctgcaaaaataattcttcatcataattttaaaaaagattgcaagaattttagtggtaattgtgaattacaacatatatacataggcacaagttgaatacatattcgtaatattaaagtcaacatattataaatataattaattagaagaatatttataataattgttttattaaatttaaatcgtggatattatccatgagtttaaatattaattcttatattttaggaggaaggttaatgaaaaagagattattatcattattagcagtttcagcaataacagtaacgttatttgctggatgcggatcaagtggaagcggtactagtactgccgacaaaggaagcagcaatgcaaaagaatatcaagttgctatggtaactgatacaggtggggtaaatgaccaatcatttaatcaatcttcatgggaaggtctacaaaatttcgaaaaaaacaataaaggtgcaaaagttagttacttagaatctaagcaagaatctgattacgctactaatctagataaagttgttgatagtggcaataaattagtttggggtattggatttgcaatgtcagatgcaatattaaaagcagcaaaatcaaatccagatgtcaattatgctatagttgataattcatatggggatgatactccagccaatgtaacaggagttatgtttaatgcacaagaaccttcatttatagttggatatgtagcagctaaaacaacaaaaacaggtaaagttggatttgttggaggtataaaaagtggaattatagatcaattccaatttggatatcaagcaggtgtacaatatgcagcaaaagaattaggtaaagatattactgtagatgttcaatatgctgaaagtttctctgatgcatcaaaaggaaaagcaattgcaaataagatgttctcttctggatgcgatatcgtattccatgcagcaggtggagttggtgtaggtgtaattgaagcagctaaagaagcaaacaagtttgcaataggtgttgaccgtgaccaagcatatttagctcctgataatgtattaacatcagcattaaaacttgcaaatgttgcagttgaaaatctttcaaaagaagctatgaatggaactaaaattggtggtaaaacttatacttatggattaaaagaaaatgcagtaggaattccgactgaaaacaagaatatggatccagcagtatataaagcagctatggcagttcaagacaaaattaaagatggttcaatagttccaccttataatgaagaaacatttaagagctttggtaaataagaataattaaataatgtatatgtgtggcaatgatgaatttacatttaaggttctagaaagctatgtgcaatggcttaagtctaaaatgtagaaaataaattgtaatatatatatggcaaatatgaaattgggatggctttgctagctagtgattcactgttagcaaagcatattattaattaagggaggacttggtatggaaattagcaaacaatatgcagtgcaaatgcgtggaattacaaaaatgtttggttcattctgtgccttagatgatatcaatattgatattaaaagaggtacaattcatgcactattaggagaaaatggagcaggtaagagtacactgatgaatatactttacggattatatcaagctgaccgaggagaaatatatcttaatggtgaaaagataaatattaaaaaccctaatatagccatcgaaaatggaataggaatggttcaccaacattttatgttagttgaaaattttacagtaacacaaaacatagtattaggtagtgaaatcacaagtaaatttggaatattggacatgaaaaaagctcgcgaagaaatattaaacattgttaaaaagtatggattagaagtagatccagatgcaaaaattgaagatatttcagtaggtatgcagcagcgtattgaaatattaaaagctttatatcgtggagctgatttgttaatattagatgagccgacagcggtgcttacgcctcaagaaattcaagatttaataaagattatgaataatcttgtagcagatggaaaaacaataattataattacgcataaattaaaagaaataaaagaatcttctgatgtctgcacaataatacgtagaggaaaatatatagatacggttaatgttaaagagataacaggatcagaacttgctactatgatggtaggtcatgcagttaagttagttgttgataaagagcctgcaaaaccagatgaagttgtctttgaaatagagaatttaactgtaaaagatgaaagaaagctagatgcagttaaagatttatcacttaaagtacataaaggtgaaattgttggtattgctggaattgatggcaatggacaaaaagaattaattgaagcaattacatgcctaacaaaatgtgaaagcggtaccattaaaataaatggagtagagatacaaaatactacaacagaaaatgttattaagaataaggtctcaacaatacatgaagatagacaaagacgaggacttgtattagattttagtgttgctgataatgtagttatagaaaaatataaaagcgaaccatattgtaaaaatggctttttaaataaaaatgaaatcatatctcatactaaagatatgataaaacaatatgatataagacctgataattgtgaattacttcccgttagaggattatcaggagggaatcagcaaaaagttataattgcaagagaagtggctaatgatccagatttattaattgcagtgcagccaactcgtggacttgatgtaggagcaattgaatatgttcataaaacattaataagggaaagagataaaggcaaagctgttctgttggtttcatttgaacttgatgaagttatgaatgtttctgatactatagctgtaatttatgcagggactattgtagatacatttaagcagggagaagttgatgaaaatacaataggtttattaatggcaggaggtaaaagaaatgaaaacagtggcaaagattcttaaaaaaccagttacttcaacattcattgcaatattttttggttttgtagtttctgcaatagttcttggtattgcagggtataactcaatagatgcttttagcgcactttttaatggtattttttcaaaacctaaatatatatctaatacaattatcaaggccactcctattattttaactggtttaagtgttgcatttgcctttaaaacaggtttgttcaatattggagcagaaggccaatatataataggtacaattgcatcaactatagttggaattaaattaaatttgccagcaatattagaaattcctttagtaattttagctggtgtagctgctggagcagtatttggtggaattgtgggaattcttaaggcgaaattcggaatacatgaagttataaccagtataatgctgaattggattgcattatatttatctaatttcgttgtatcaacagatgtatttcaccaaccggattcaacaagcacttatatgattaatgaatctggatttactactatacttggtaattggaagacatctgatgctggaatagaatttctttctcacaacaaatggttatcagaagtcttgttaaaaacagatgttaatattggaattattgttgctattataatggctgtagttatatcagttttattatataaatcagcaaagggatacgaattacgtgcagtgggattaaataaagatgcagcagaatttgccggaataaatgttaatcgtaatataattcaatcaatggtaattgcaggtgcattatcaggtcttgctggagcactagctattacaggcacagcacctcataagttatctactatggctgcttttgaaaataatggatttaacggattatcagttgcattaattgcaggaagttcacctattggttgtatctttggaggattgttatatggtggattactatatggaggccaatctgtacaatctgcaataggtgcaccatcggaaataataaatataatgataggtactattgtatttttcgtagcattaactaagattgtacctgctttagctgacagacttttaaagagaggtgaaaagaatgttaaatagtattgcactattaataggtattacactaatgtactcagcaccgttaatatttggagcattaggaggagttgtttctgaacgttctggagttgtaaatatcggaattgaaggtatgatgactataggtgcatttactggtgcggcagtaggatattattctggaaatgcatggcttggatttttagctgcaggaattgcaggtggaataatggctttattacatgcagttgcatctataacattcaatgcggatcagacaatatcaggtattgctataaatttattgggtgcaggtttctctttatttacatgcaggttattatttgaaggagctactatgactaaaccagtagttactaaattacctaaagtatttggagtagatattacagtttttatagcacttttaattacagtagttatttggttcattttatataaaactaaatggggactacgtattcgtgctgtaggagagcatccagcagctgcagatactcttggaataagtgtaactgcaactcgttatgtgtgtgttatgatttctggaatacttgcaggatttggcggagcatctatgactcttgcaataatagcgcaattcaccccaacagcaattagtggtcaaggctttattgcattagcagcagttatttttggtaaatggactccacatggcgcatacggagcttgcttattatttggatttgctcaagcattaacagttgtattaggtggtggaaactttgctattccttcgcaaatacttgcaatgttaccatatattctaacaattgtagtattgattctttttgttggaaaatcagttgcaccaaaagctgatggagttccatacgaaaaaggtactcgttaatagaaagaaaaaacattgttatttcacaggactgcgaaaatttcgatgaaagtgctgagtgttaattcgaattatagttatatatatgtcgcagaataattctacatcataattctagaaacattgaaagaattttagccgtaattgtgaaatgtgcattgtgaattgtaacatatatagttataaaataaatttaaggagtaatgaaatatgaatatagctaaatatatagatcatacaatattaaaaccagaagcaacagtagaggatgtaaaaaaattatgtaaggaagctaaagaatacaattttgcttcagtttgcgtaaatggatgttatgcaaaattagtaagtagtgaacttatgggaactgatgtgaagacatgtgtagttgttggatttccattaggtgcaatgacaaaggaagctaaagcttttgaaacaaatcaagccattgaaaatggagctactgaaatagatatggttataaatgttggggcattaaaagataaaaattatagtttacttaaagaagatatagaagcagttgtaaatgcagccaagggaaaagcattagttaaagttattattgaaacatgtttattaactgatgaggagaaagttaaagcttgcgaaatagctaaagaagttaaagctgattttgttaaaacatcaacaggattttctactggtggagcaactaaggaagatattgctttaatgagaaaaactgttggaccagatttaggcgtaaaggcatcaggtggagttagagacttcaaagctgctatggatatgataaatgcaggagcaagtagaattggtgctagtgctagtatatctatagttagtgaaagcaaataaattattattataaaatagtttaaatatattgatcattaattgagatgatgtggttaaaattatggaggtaaaaaatgagtgttcatattaatgcacctgaaggtgctattgcagaaagcgtattattaccaggagaccctttaagagcaaagtttatagcagaaaactttttggaagatgtagtttgctataatgaagttagaggtatgtatgggtttacaggaacatataaaggtaagaaaatttcagttcagggaacaggaatgggaataccttcaatttcaatatatgcaaatgaattgatacaaagttatggggttaaaaatcttataagagttggaacatgcggtggatatagcgaaaaagttaaggttagagatcttataatagctatgtctgcatcaacagattcaaatcttaatttagtaagatttcaaggtagaacatttgcaccaacagcaagttttgaattattgaaaccagcatacgatatagcggttgaaaaaggctttgatcctaaagttggtagcatatatagctctgatgtattttatggcgatgatgatgaagattggaagaagtgggctaagtttggttgcttaggagtagagatggaagcagcagcgttatatacaattgcagctaaatttggagttaatgcattagctttacttacagtaagcgatcactttgtaactggagaagttacaagcgcagaagaaagacaattgacatttacaaatatgatggaagttgctttagatactatagcaaaaatagagaattagtataaaagagttaaaatagcaatttgaaagagaagattcttacttgaggttagagataatcatatgctagtaattagtatataattaaaagtaaggattttcttttgttataatgcaaattttaaattgttaatacacaatataaggtcaaaatatatttgttttttgtccataatcaaactatgatttagccatcaatatattgtaaaaataatgcttcataataattctaaagatagtgcatgaattttaaccattattgtgaattatgaaatgtgcattgtgaattgcaacacatatatttaaatatatatataatttaaaataatacatagattggaatattgtgtgaggagacctaaagaaaattaaaatgaaagtaagtgaaatgaatttatgaatatacaaatatttggaactaagaaatgctttgatactaaaaaggcagaaagattttttaaagaaagaaatataaaatttcagtttatcgatttaaatgaaaagcctatgagcaaaggcgaatttaataacataattaaagcggtgagtattaatgaattaataaatacgaaggcaaaggaatatgtaaaattaaactttaataatatacgaagtgcagaaattaaagcagaattattattaaaaaatcaaaaagttataaatacgcctatagtaagaaatggtaaagaagcaacagttggatataaagcagaagaatggaatagatggatagaaaacaactaaaataatttttgaagatgatgctactataccaacagtttctatttaatctcatgtatactatagaatttttttagaatactaaaattgagattattttagaaaggatatgaagtagttatggcaaaagcaggaatgagaagaccagacccaagtgaaccacatggaacagaaagtaatcataaaacacattataaaaaaaatgatgtaaaagatgttccaatggagatacaaggaaaagctaagactggaaataagaaagcgtctcccatagaataatgtgtgtataaatagagtcatagtagaagtgatgtagtgtaaggatggaagttaaatttcatccttatattatatacatatattttctcaatattatggaagaactacaattcaaaataaattaaaacttattttgacaaaatataaaagatatagaataatataaataataaataaatttttactcgaatattgttttataagtttaatataatcttatttattattgttcttatatatttaattaggggattttttaatttttaggtcatagagatagatatatattctgtctatacttagagacataaaatttgttatatgatgggtgtgagtattatggagaagagtacaaaagtaataagctttaaccagttaaaagaaggaatggtaatagctaaaaatgtagagcaaaatgggagtgtattacttaaaaaggatatttcggtaactgaacaaattatagaaaaaataaaaaagttatatgttatcggaaatgtagagatatattgtgaaaatacagctgcaaaaagtagtgaagtggaattaaagaaagagacacaatgtaaaaagattgaagatgaattcaatgaaatttctttagcattaagaaaaacttttagacaacttgtcaataacaatgaagaagctctaaacgaagtgagggaattttctagaaaaattcaaaatgagatacagccaggtagcttggttataaagaatatagttctttatggaagtggaacagattcaatatatagacatggagtaaatgtagcagcactaagtgcactcataggaaaatggacaggattagaaaaggcgaagttaaatttattagtatattcagcaattcttcatgattttggaaagacaaaaatagcaagagaattattaatgaaagaagtaggattaacacaaaatgaatttaatacaataaaaacccatgctcagaaaggatatatggtaataaaagaactttcatttttggacaaggctgtgagctatggggtactgatgcaccatgaaagattagatgggtctggttacccgcttgggctaaagggggaagctatacatccttttgcaaaaatcatcgctatagctgatgtatttgatgcaattaattctaatagaggatataagaaaaaaaggcttccatttgaagcattgcaaatagttaaaaacgaaagtttaggaaaactagattacgaatatgtaaagatatttttagagcatgttatagattattatacaggtgaagaggtattattaaatactaatgaaaaatgcaagataatacagatgaatgtaaataatttagaaaagcctctgattttgaagggcgaagagtttatagatttggaaaaagaaaagaaattatatattaaagagatattattataaaatagaaagtttatgtagtttataactattacgaaaatataattagagattaatataatttaactagaaataaataaatttaaaataaaaatgtgataaatagtatataataaggtagttgttttaaaaaatttctaataagtaaattttatttaaaatatttaccttatttttgtatgtaaatttataaatcaatctatattttaacttgaaattataa

SEQ ID NO: 98 - DNA, 22715 bp, Clostridium beijerinckii
aaggttgaattaatattaaaatataggaaattaattgcaagatatattttttattttgttactatattaatttttattgttttaatactccattaatgtaattattaagcatatatttatattattttaatatatttccaaaataatttctagaaataattgtatgtacaattttaatgtaatataatatacttgtacatacatgaaaccgatatctttaattatgtaaatgtatactaaaaaatatgtagtaatttattaaatacggaggtgttatcatggcaatagaaaaaaatgttttcggaacaatgcctgatggaaaagatgtttatatttatactttaacaaactctaacaaaatgaaagttgagatttctacttacggtggtacaatagtttcatctctagttccgaataaggatggtaaattaattgatgtaacgctaggatatgataatttagatggttatttaaaaggagataaatttttcggtgccttaataggacgttttggaaatagaattcaatatggaaagttcatccttaatgatcaagaatacactttagctcagaatgatggagaaaatcatttacacggcggcttaaaaggctttgataaagtagtatgggattcaaaaatagttgaagattctcctaatacattagaactttcttattttagcccagacggtgaagaaggatatcctggtaaccttaatgttaaagttacttatgtccttactgaagataatgctctagagataaattatagtgcaacttctgataaagatacagtcgtaaatcttacaaatcatgcttattttaatttatccggtcattcatctggtgacgttcttaatcaaaaattgatgataaatgcagataagtttacagtaaacgataaatattcaattcctacaggcgaaataaaagaggtagccggaactcctatggactttagatcattaactcctatcggcaaaaatataactagtgattatgaacaaattgattttggaaaaggatacgatcataactgggtactaaataccgatggatgtgatagctcaaaagctgctcaagctattgatgaaaattctggaatagtattggatgtttatacaaccactcctggaattcaattttacagtgggaactttcttgatggttcagatgtaggtaaaaataaatctgtttataatcgtagaaatggattttgtttagaaactcaatattttcctaactctataaactgtagtaaatttaaatctccaatacttagagctggagaagtatataaagataaaaccatttataaattctctacattataaattctgatattataatgcactaatataaaaaggtacttaaccaataaacatccatagtgggtaattatgttttatgatttaattattaaataaaaattcgcctaaaatataaccactatggattatacaaatattataaagagcactaaaaaataaacactttattttccatgattgtatgctaatccaactttgtcttaaagattgctttctgacctaagtcgcctaatagatactattctaaatgaaatacgttaccatacaatcattgaaataaatcaaggaaaatccctatctacaatggcgacgctatctatttataaagttgatattattaaaaaacatgctcagtcccaaaattaaaatttcttattaaagtatattaacctcaaaagatattcatcacgctgagtatactcaatacgataaggttgcttgaatttatgcattactaaatttattttaaaatacaacttttagaatgttttttgtaatctatgcaaatacatttcaatatttatacatattttaaaattaatgcttattaactttatgcttagacttatcaaataccttgcgcttatatttttaatgtcatttttattaaaggagaatttatatgtataataaattaaaaaaagttattagtaactatcctattaatacaaaattcaaaataactttttcaacaattttaggacttacttctttccttatggtagctgtgatatgcataatattgtttatttcatcgcaaacaaattcgctatataatggaccatataaagtttctgagactatttctaatattagagtaaacttacaaacaataaaaatggacatgttcagatcaatcacagaaacagatccaggaataaagaacttttatctagagcaagctgatacagaatctatagctctttcgaaaaatatagaaattttaaaagaaatacataagggagatccatctttattaaatgaatttttatcaaatgtaaagggtttagatgataagagagaaaaattaagtgacttattaaaatcaaaaaccaatcagtctgtaatgaaagtcagccaagatgcttactcttcacaaattaaagagtctgaagaatgtatacttaagctttttaagtcatcccaagaagatgctaattcctttgttactaattcaaatacttatagaaatatatcactaatttctattacgtttattatgataatattaattgtgatatcattattgttaattagggtattgaatgatgtattacttgaagggattaatcatattaaggatattgcaaaaaacctagctcatggaaatcttaagataaatactgaatataatgcaaaagatgaaatgggtgaaatgtcccgcgatttaactaattctatcggaatgttactttcttatattaatgatataacaagcactttggaaagattagcagatggagatttagatatacatttagatacttcaatagcatatataggcgattttaatcctatacaaaaatcaataaaaaatattatcgattctttaaatattatatttcagaatatggatcaatcaatctcatcaatttctaatggttctgagcaattatcttcaactacccaaatactctctgaaggctctattaaccaggctggtgctgttgaagagctctttactagttttaagaaaatactgcaaaaggttaataatactactaacaatgcagataaagctaaaagtttttccattaatgtaaaacatattgtagaagaaggaaacgaaaagatgcaaatattgatggaatctatgaaagaaataactatctgctcaaaacaaattgctgaaattataaaagcaatagaagaaattgcttctcaaactaatcttttagcattaaacgctgctattgaagcagctagagccggtgaagctggaaaaggttttgctgtagttgcagacgaagtcagaaatcttgctgaacaatctgccgaagccgtaaacaatacttctaagattataaaaaattcattgcatgtagtagctaatggagaaaagctggctacagagactgctgctgcattagatataatagttaaaaatgtcgatgatactactaatttagtgaaagaaatagctgtagcctctgaagaccaaactgaagctataaccgaaatgaccagtaaggttgatcaaatttctcaagtagttcaaactaattctgcaacagcagaagaactagcagcatctacagaagaattagcttctcaatctcagataataaaaactgaaatatcaaagtatacattaaaaaacaaataatgaattttggccttttagatatcaatacttatttcaagccaaagaattagaatgtaaaaattctttggcttcaatataaaaagatcatatctgtgccattggcataacgccatgataaaactgctttacttagacgttaaagcgcaatcatataatttctttttatttctgttcttctaaaactctatatattgcttttgctactcctaaattgtcatttgtatcagttatatattttgctatttcttttatttcaggaatagcatttcccatagcaactgattctttgaattctgtaaacatagaataatcgttaaaactatctcctagcaccaaaacttcatctctttcaaatcccattttttcagctacttttgcaagtataatgcccttttgagcagttatatccgtaatctctatattatccctgaatgaagatgaaacagcaattcctttcaattctccaataacttttttcattttatttataagctctatatctttatggaaagctacaaactttctaatttctataccactgcttaaaaatttatccaaatcagaaatataattaagttgaacaaaatatggttgaactttggcaagttccaaagcttcttctggagtaagctctggattaaaggataacgttctatatgccatttcctttaaagcttcctctttagtgtctgtagtatatattcctttattagtaaatattcttgcagatactttttctctttgaagtatatttataattttagttgcagtttctagctctatatttatctcttctagaatatttccatcctcatctctatactctgccccattcataagtacacattgacatcttatattattttccatcaaaagaggtttaacagtatcatattcccttcctgttgaaattgcaaatataattcctgccttctcagcgcgcttaatagcagatacggtctctttatctattttatgttttgtattcaacagtgtcccatccatatctgatgcaataagttttatcatttgggatcatctcctcgctattttattaaatttctcataccttaatattataacaaagtttattcaattgtgaaaataagcgacatgatttcacttttatcaatatatagttaaaaataggttttattgattcctaacttttatttgacatcttttctattcatcaaacttataacacaaaaaagcctaccctttatataatataaagtgcaagcttttttattcacccaagataattgaaattattaactatataaatcactaattcatacaactaaatatgatttctatattaatttaagcttatttaaatacttgatttattataattttaaatatatattttatataataaatctacttttcccccccatcaaaccaattattcaattaagataataattatagacacttatttgtaatatctatataattttactagtaaaacatattacattaaattatttagttaatactagtcaagcttatcaatttcatatttttatagttaaatttctctacagaaatatcaaatactattccactacttaaaaatatagtattatttaaaactaaagctggatcatctttttccaagttcaaaaaacttgcttcttcttcagttaatttttcagaagttattattctatccgcaaatcctatttttaattttaaatcatttgtaatgtaatcaaatatagacttactacatatttcttcattcaaataaggaataatatctttattatagtaagattcctctatttcaattggatctccatttaaatatcttactcttttaatataatatatctttgtgccaatatcacatttcattctatttgataatttttcatctgcattaattaacgaaaattcagcaaccttactttcaaacttttcattagaatactgttttgataaaccatttatatctcttatttgggcgcaaccattttttgcaaactcccttaaaaatatcccactaccttgcactctataaacataacctttagtcactaatatttctatagcttttcttatagtatttttgctaacattaaatttttttatcagttcctcttctgtaggaagttttttactcaaactatatctatcttccaacatttctttttctaaaatattaataaccatttcatactttgtttgcatctctgtaattcctcgctttattttaaataagtatttttactaatatcttcttctaattcgtaacacgttaatcctaatctataaagtttctaaaaacaataaaaactgttatatcaaatattaaacccaatatttcctctttcattttcactcgaaatattgggtttaatacttgataattccctttaatgaatatcattatcacataaattcacttttctcttcttaataatttatttaatatctttactaatatattacatcttttacttcttaatatttaaactttatatctattgattcctccaactagcggaataatttaactattcttataattcattggcatgatttattatataatataaggcaccttttgtaaaggtttaaataacttgttttaagttcacaaaataataattcaaatagtatataagttgaattataatcctatattaatactaattatatatgcttaaccgttaataatatagataaatctttaacgcaacttatatagaactgctaattattttgtataatcagcagttcttacttaacttatgtatcatgtatatttatattaacaacatactagtccaaatattaatttgaaaaagtctgagttcccatatatttatcactaccactaattacacctataccaaccttagtgtaagaaggattcatcatatttgccttatgccccggcgaattccaccactgattgaataattcaactggttcataattgttgtatgctatattttctccagttgtagtatattcatagttaattgcttttagccagcttgtccaattattgccctctggagtagtatggtcgaaataattgtattgtatcatatggttactcttatacctagctacttgaactaactcattatccataactaaaggatttagacctgcttcagttcttttttcattcattaactcaaaaattttattttctgccattgtttgtatgcttatagaatagtttcttggtaattgaggaagtccatttatatcaacagtattattactagcttgtccatcgtatgctgagttagtcaacagttggcctgaatcatttgatgattctattaactttccagactcatcaaagcaataaacctttcccgcaatattttgaattcctgtttgcattgctccattgctattcatataataccatttattattatcctgaatccaacctatttgcatcactccattattattaaaataataccaggttccattgatattattccaaccttcttgcattactcctgaatcatttaaataataccagtttcctttgtcataagtccaatctgttttcattcttccgctttcattaaaataataccattcatttgaaatattcttccatcctctagctaccttgtttccttctttatagctccatgttctatcatcattttgagtccattccgcagatgcttctaacggtgatagtgtagcaattgttgtagccacaataaccgcacttgtaattcttgtaaaaaaagttttcttcattagttttcctcttttcttttgttattctgttatcttatatatcgttagtataactcctcataaaatcgttttcagaaccacatataaaagtttttccatataattattttaccataaattcgacatttttcaacccattttattctaaaatattttataatagctaaacagactatataattctcttttttccttctgatttattgtaaatttattataaaatagttatattcatatatatattttctttaagtacttatgtctttaaaaatttaaatacaaatttattgttacagcatatatataatataaagaatttatgttaacgcaatttgttaattaagttaattttcatataaatataaaaatcaatcattttaacacctaattcattaactcatatattagaaatagataatatttcaggggagttataatgtataaaaaaggtgatttccatatccattcaactttctcagatggaaagtgtacccctagggagcttgttattctttcccaaaaaagagaggtggatattatttctataacagatcataatagtacatctggtttagatgaagctgtcatggctggtgaagatcttggtgtaagagtcattcctggcgttgaactttcaactaaatacaattcttccagagttcatgttttaggctactttaaagatgatagctacaaaaatgagcttttagttgaagtattaaaaaatgtaaagaatcataaaatttcaaatataaaaaaattgctaggaaaaaatctagatttttataatactaaggataaactttctgtagagactggcataaaaattctaaagttttttggagctacagtggttttggcacatcctgtacttttaaacaaatctgattttgaaaaaatcatagaaatggactttgatggacttgaagctaaatacttcagtaatacagaaaatgataccgaatacttcttaaaagtagccagtgatagaaacttactttacacagccgggtcagatttccacagttgcaaagaattttatagaattcatgggataataggtgacgtttatctaaatgaatctgaaatatataattttttgatacgtggtaagttgccatacttgtaaatactttactagaattatttaatattaaaaattagatatatgtttaattgaattattactatactacatatatctaatttcccacttcataaactatatttcttctagcttttttcttcttttatatattttgttagctaccaagcatgctgtcacagtagttccaaaaacacatatagcagttggagccactgctataaatccagccaaaagcaacccttttcccgaaaccttaatatcaacacttctatctttagacttaaaatttacattaatacttcctgcttctttatctgccttactaactttgttaaaagatccattcattatctctttcttaaagtctagaattcaatcacccctcatataatttacgatttatatttctgctttatttatatcatattaatttaaatctattatatacaaaaaacttctagctttaaataaaatttcaaacaaaaaaattgtaactatactatagaaaaaatctatacatagttacaatcctaattataaagttcattaactattttattccaattgttgagcatgcattctgctattttcgaatcatacattattcctttattcttctttatttcatctttgcataactcatcacttatggattttctatacggcctatcacttttcattgcatctatagaatcacaaactgctaatattcttgatgcaaacggtatttcttcttcctttaatcctttaggatatccttttccatcccatctctcgtgatgatataagactatcctagaaatatcttcaaacgtacttgttttacttagtatattatatccaatatacggatgattcttcattaattcccattcacctacttccaggctatctggtttatttagaatgttatccggcactccaattttaccaatatcatgcagatctcctgctatatgtattaattcgagctcttccgttgtcattcccaagacttctcctaatttatatgccatatctgctactctagtcgaatgaccatatgtatagaagtcttttgcttccaaggttgcaaccatacttcttacaacaccatgatacatatcatcattatattgttccaatatttctcaccgccttactaattttgctattcttactaaatataatatcataaaatctactgtgtttgaatataattatttaattcaattaagataattaaaatacttttcaaatatttatagaaacttgacgattaaatcacaatatagaattcattattaggatcatattcttgtgtaatttcgccccaatttttaatgatacaatctactatttcaggatcatacattatacctttatttttaattatttcattcttacattcttcatcgcttattaattttctataaggtctattacttttcatagcatcaatagaatcacaaactgctattattctagatcctaatggtatctcttccttacataatccatttggatatcctctcccatcccatctttcatgatgatgtagtactatttttgaaataatatctaagctttttactttgcttaatattttataccctatctctggatgcttcttcataagttcccactcttgtaggtcaagtttacctctcttatttagaacactatcaggaaccccaatcttacctatatcatgcaaatgccctgcaatgtgcaaaatctctaattcttcgttctgtatccctaaatacataccaagcttattcgccatatttccaactctagtagagtgtccagcggtgtaaatatcttttgcatccaatgctgcaaccatactttctattatatcgtggtaaacttcactactaaataacatactcataatcatacctccttaaatcaaattaaaacgcatctatataaaattaaactctaaatcatatttaatttacttaaaattatctctcattgaaaattattatcaattatattatatcctattttacttattaatcaatatttaacttttatcataattttatgataaatatgaatattatcactaaataccctattaacttcttacctttattactgctattttttaagaacaaaagtgcataaaaataaggggagttaaattaacttcccttagcttttaaataacactatttaattattttctaaacattcttataataaattttataacttcatttactactataaccataaatgctaaccctagaactttactccacattatcaccgataaagcaactgaactaaagaaagtagtaaatacttgagtaaatattatttgagccaatccagttataaatattacttgaatagctatcttgttcttaaaaaagttaggaaatatactttctgccccaaattctctgcagttaaatgcattaaatagtgcactaaatgcaaataatccaaataaaacagtttccatctcacttgcaaatccgtttttttctgtggatgctcctaagatattgtacttcatctgtatgagtaaaattgatgtaacatatattgcatttaatattattgaagtaatcataccttttgtaattatacttgaatttctatttacaggttttctattaaaaacattctttctaattggttccaaacctagaactagtgctggcggtccatccattattatgttaatccacagtaattgaatcgtagtaaatggcatttcaaaatttaatatttgtgaaattattgcaactaaaaatgctattatgtttacagtaatctgaaattgtatgaatctttgaaaattttcatacacgcctcttccccactttattccatcaatgatagtagtaaaattatcatctgttaatattatatctgcagcatttttagaaacttctgatcctgaaatacccatagctattccgacgtctgcctttgttaatgctggtgcatcatttataccatcaccagttactccaactacttccccattgctttgaagagcttcaacaattctcatttttgtctccggcttacttctagctacaatagctatattttcaatctcatttcttaattctttatcatttaaagtatcaatatatgtagcttccactgctttttttccacccttaagcattccaagctcatttcctattgctatggctgtatttatattatccccagtcaacatcttagtttcaataccagctcttttagctgcttctatagctttagctacatcttcccttagtggatctcttatggcaacaaaaccactgaatattagtccattttctccatctaatagtttaggttttaaaatacttatctcacttgtaatcgcagcctctgcttctacatcttcaataatcctaaatccaaaccctagaattctcatagatttagcctgtagtttctgtatttcttttattatttcattttttctctcttgtgtaagatctataaatttattatttataacttcattagtagcatttgataacagtatttcaggcgctccttttacgagtactacattcattcctttaatcttcataacagtagccatgaatttattttcagagttaaacggtatttgatgaatcacttcactttcttttctttcctgtttataatcatattcctctagatatgaaagtagtgcacattctgttgaattacctaagtaatttaacttatctccctcaaaacttatatcagccgttgagttcacaaggcaattttttataaaataatcatctatatcatttttatcatcaaagaactttccatttaaataaagattctctacagtcatcctattctcagttaaagtacctgttttatctgaacaaataacgctaactgagcctatagtttcacaagcctctttttttgttactaacgcattaatcttagccatcttttgcatcgttattgctaatgtcatattaatcatagttggcaacccttctggcaccgctgcgactattaaagcaatacatacaacaaaagcagttttaacaggatctatagaatttaaaaacgatattactcctgatgtatttatattcaaattaccagatataatcattttggtaaccataaatataaatagtaaacctgctataacgcttgatattttagtgattgtcttacccaaatcccccaattttctttggagaggtgtttcttcttcatctatttgaagagtttgagctattttacccatttcagtattatcaccagttgaagttacaaccattgtcgccctaccgtaagcaattagagttccgccaaatcccatattaatttgctttgctggaattggatcctgcatttctttattttcttttacttgtatttcctccatattgacaattacttgagcattttttgtaacatcttctgattcaccagtcaacatatcttccctaacctttaaatctattgtctcaataaatcttccgtctgctggtatcatgtctcctgtttcaagatatatgatatctcctggaactaagtcattttttcctacttgagttactttgccgtttctcaacacctttacaacaatatcttctgtcattttggccaaagcttctgctgctttttttgattttccttctgtaattattccgatagttattccaattgcaacagcacatactattccaactgaatcataatattctccaataattgcactaactaaagccgctatcaaaagaataagcatcattggttccaataatgcattttttatttcttcaaatatatttccttcttttttatgagtaaattcattttttccatacttctcagttctctctcttatggatgaatcatttaggccaatctctagatcgacatctagttcttctaaaactgattctatatctttattaaaatatttcattaattaaactcctcttattaacatgtagctccttcaaatatgattcaaaatctttcaatatattttaacataaaacatagtcaatattaagttaacttataatacggacttaactactagtttatattattcattataacccattttactacaacagtatcaatttttagatacttttattaattagcttctttttgagcaaacatttttattatatttaataactctcccccataagcttcaattttttttgttccaactcctctgatctccaacaattcatctaatgttctaggtctgctattagatattgcaatcagacttgtatccgaaaatattatataaggctttattttatccttatatgccctatcttttctccaagattttaaagcttcaaatagctctgtatttattataggttccctactatctaatatcttaaatacaaccgattccttacttttcaaaaccctaattgatctagaattaagttttaacattgaatatgtgccttctttcaaatcaacgtatccatcatctagtaatctttttatcaactcttttataaaggtgcttccatattccttcattattccgtatgttgtaactttatctaaattattttgtattattttaggtcccttaaaacctttcaaaatatccacaagaactgatattccatactgttcttttgttctaaaaactgtggataaaatcatctgactttcttttgtaaaatcttttaattcatcatcgtttaagcagttactgcatttattacagtaatttagcttccgatcatttccaaagtaattcaatatatattttctatagcattcctttaaattacaataatcaatcataaattggaactttctaagctgaatttctctcctattcatggaagaacttctatttataatatattccactctacttatatcttcttcacaataaaataagtaacagtcacagttctctccatctcttcctcctcttcctatctcttgataatacgattctaagttttgaggaaaagtaaaatgtactatgaatctaatatttgacttatctattcccattccaaatgcattagtcgcaataattacatctaaattctcatataaaaactcttcttgaaatctttctttctcttcatctttgagtccaccatgatacttaccaacattaaatcctaggtcccttaaataataatataaattatctacttcgtttcttgacgcgcagtatacaataccagattcaccttcattttttctaattatatccttaacagtttcaatcttatctacttccttaagtatattaagactaagattttccctattaatatcgcctttatatatataaggtttctctaaccccaataatttgattgagtcttctctaacttcacttgttgctgttgcagtgaacgctgatattataggtttaactttaagacttttataaaaatctgatattcctaaataactctgcctaaaatcatgcccccactgagatacacaatgtgcttcatctatagcaatttggcatatatgaagatctttaatcaattctctaaatattttggattctaatctttctggtgatatatatattatcttgtactcccccatagatgcttcaattaatatacttcttatagtgtccatattctgagtactatttatatatgcggctttaatcccagccccaactagattgtccacttggtccttcataagcgatattaaaggagatataactatagttacaccttgcataattatagctggaatctggtaacaaatagatttccctgcccctgtaggcataagacaaaaagtatccacaccatttaaaatactatttataatctcgaactgccctcttcttagagtatcaaatccgtagtatttttttaaagcataaaatatcttttgtttagtatccatctttgcttccctttctcttatatataataaattctacttgtaaatttcttttttagcatattaaataaaataacgagtctaaaatgccattgttatttttcattaggcaatcaaatagattgcccatggtaagtctattaaaccaatatgctgatgagaagagaacccaaatctgtgatttggtgtgactctcttactcagcgagtgtatgcgaattgagctttccatgtctgaaaacagtcttggcagatggacttgttatttttcaattataccttaatactagtatataccacataattaaaatcttaaacataaaatgattatctccaaattaacccacacaacaactcaaacaattctaataaatttttcggatttttccccgttaatttttttattttttctagcctataatttaaagtatttctatgtatatttaatctattagccacattaccgatatccccattctcttcaatatatgcctgtatagtttgaataagttctaatttattccctgccttatcaagatttgacatcattgataccaaaggtaatttattatcatgagataaattgataaaaaatttcaagtcatcatagttataaactaaacttgctgattttatctttgctccaaattccattgctaattctgcactttctagtgaaatagctgcgacatcttcttttgctccaatgcttatcctatttacatctttatttgtttttaagttctcgagcaatccattatacatgtccttagacgtaacaaaaaatgctattctattatcaacctcactataatttgaatacttctgatacaatattttaaagcttcgagaatttatatttccatccacaagaataactctgcattttttcgtaagatctattccatagcttttagctctttgatggaaactttcatcgtattttatctttctatgagctagttcattataaaatttctgcatacttaatcttttgttctgaatttcctcgtctgctttagattgttctattaataaaactgcagttacacggacgagtttactaaatcttcttacctcatctggatgcccagttattcctatcactcctattactttattattgataataataggttcgttgaccccgggcttcattctataatcttcttcatacacttcgtttatttgttgattatctattgcttccctagctccctcatgtacattcccaattcttttaatatctccactgcctatgattattccattctcatccataacatttatattgtaaggaattacattcatcatttctaaaacaattttttgtgctatggttttagatagcgtcatatcaatcatccctttctaggctataattatattatagaaatataaggctataatttaaactaaattttttcaatatatttagaatataaacaacttgtaatatgaattctaccgaaagcagaaacattattattccgcagaactatgaaaatgtttctactttttaatatagtatttgttgtaaagtgtaaatctaattttcaaattatttatctatctactatttattatgatactttttaacaataaaaaaaagctaactatatattaattagattatcaatcaaaataatgtccacatagataaattaaaagtgcgtcttaaaataaaacgcacttttaatattatacctatattaaattaattaaagtagattcataagcctaactacattttcagcagtcttttcaatattctcctgaccttttaccaaagcttcttctaacgaagttgcccccttagttattccaaatattgaatctattccactttcatatagaacttctatatcttcaccaactctcccagctagtgcaattaccggcttattatgttttttagcaattgtagcaacacctaaaggtgttttaccgtattgagtttgaaaatctatgcttccttctccagtccataccatgtctgcttctttcactttttcttctaatgaagcatattgtatcaccatttcaatacctttttttagagttccatttaaaaatgccataagtccagctccaagtcctccagctgctccagctcctggttcatttaaaacatcttttcctaattctttttttattatgtctgcataatgtcttaaattattatccaatatttctatcatttcatgtgttgctcccttttgtggtccaaatacattcgaagctcctttttcaccacaaagaggattattaacgtcacaggctacctcaattacaacatcttttaatcttgggtcaaaattctttaagtctaaactatttagttttcctaattctccaccaccaagagctaattcattgcctttatcatctaatagttttcctccaagtgcctgtataactcctgctccaccatcattagtagcacttcctccaatacctattaatagtttttttacacctctatctaaacatgcctttataagttgtccagtaccataagttgtagttagtaaaggattcctctgatctggtggtactaaatgtattccacttgcactagccatttccaatattcctatttctttatctcccaaaataccatactgtgcttctacttgattaccaaggggccccattacctttaatgaatatatttctccattagtagcatctactaatgactgcatagttccttctccaccatcagccataggcacatgtaagcattttatatcactatttgctttttttattcctctttccattgcctcgcaagcttcttttgctgtcatgctctctttaaaagaatcaggtgctaatacaataactaaatcttttttcattttcaacgctcctaactaaatttttatattttgtgagattattaaattaaataaattttacttatacttatcttattattttataaaaccgtatattattattgatacgataaccatagatcctccaactatagattcatatggcattaatttcatacgttcctttatattcatttttactgcatctgctgatgcgtggaagaagttaccatgaggtagatgatcgataactacagctcctgtgttgatcataattgctgcacttaaaggcgcgacaccaacagctagtattgctttcgcgaaagttcctgttgctacaattgcacctgtagatgttgaagccgtagctgctgccatcaatatacctgatataggtgctaaaaatattcctgaaatacctgtttgttgaatacagtatactactgcatcacttaaatttgatttagaaataatacccgctattgctccagcaccaattaatatcattacagttggcgtcattctatttaatcctgatgttgtatactcaagaatcttactacgttgtcccattgcaaacaatccgactaatcctgctataggcaatatatacattgcatctatttgaatagttgctaagaatttcagatgcaacatatttgctataggattaagtgctaataatattacagcaactattggcgctaccatcgactttccaaaacttggctttatcttattatctactctaactggtatttctgactctttaatcatttctccttttttactaattaacgtcgcaacaaaatatgtaactataagcccaattacagctggtataaatgctcctatcataacttgtgctaattcaacattaaatcctttagctaccgcaattgtattaggatttggagaaattatatttccagccttacctcctcctatcatagctaaaagtatagatgacttagtgattccaacttttttagccacaggaagcgctataggtgcaactataataactgtaaccggtatgaaaactccaaccgctgtgattatcatgcttgatagtgcaattgctaagagaacctttttctctccaaatttttctactatagtctcagcaattttctctgctgctccagattcaattaatacacctgcaagcactcctgctgctattacacgaacaaccgctcccattacgctattcgtaccttcaatgatagcttgtgctgtattagctaaactggctccaccaattaatccgcctataacagcccctccaaaaagtgcatatacaggattcactttccttaaaattagtattatagcgattactaatccaataatcgctccactccaatgaataactgccattttacttcctcctcaaattcaataattatacaaatttatactttattataccgtgtaagcgagttaacgtttactaacatatacataataatatatttagtaagaccttgatattgtttacttgacatttttttttgtgtatttgaacaataggctcttaatttaaatcttatgtgctactttattagttgaattttcatactatgcacagcttttaaatatctatgccttcttacgtgaaactgccgctgcagcgagtctttcttcataagtttaatattattaaactctgaaagtctggcttttaatagtataatagtaactattctaactgttttacttcttcaatttatttaatctattgtgcattataacaataattcaaaaattaaaagctgccgacattttgccagcagccttagaatagaataaccaaattcaaattaatttcgttatctccaaatttaaattatcttaaatttctatttaaacatatctttaaataatctactttccttcacatcttgagttactttagccaagttgctagtatctccaattaaaatagctccacataaacggttgtttgcaaaataatattttgtatatgtcttcttaaccggatctttaaattcaactgttttatattggatttctgggttcttaccgttgtcaccaattgcatacagtgaagtattagctccattaaatgttaatgctgcatctactgtttcataagttaatgagtctcccgctgcattagcccctgctacttttcccatttctagagcttgtggccatattccataatttatcccattatattctgcacaatctccacatgcataaatatcagaaatattagtctccattttttcatttactattactgctctattaacatcaattcctgcttcctgagctattttagaattaggtacaataccacaagatataacaactaaatcagctgcaataacttctcctccattaattctaactccagtaactgaatcttcaccctctatttcatcaatttttacgcctaatctcacatcaattccttgacctttaattatttcttcaaggaattttccgccttcataatctaattgacgtcccattaatttatcagcaagctctaatactgtaaccttgcattttgcttttgttaattcccatgcagcctcaagtccgagaactcctccacctattacaactgcattctttacctttggcaataattctgtaattttatctgtatcgcaaatcctacggattgctataacttctttcttatctttccctgaaattggtggaacaaagcattcagctcctaaagcatatatacatttatcatactttaatttaattccatctttaaacacagcctctttatctttagcatttatttgaattaactctctgtcaagaacatttgtaatattattttctttataccaagcttcatcatgaactgcaatttgtttcgaattaaatttagctatcattgactttgtaagcattggacgattataacctagcacattttcattagaaactaatactatagagcaagtttcatttctttctcttatagacgttgcagcgcttatacctgccgctccatttcccagaattagataaatttcatttgtattatttttataattgctatcatctatttcaactggtacgaaattttcttttcctacaccacaaactggacatatttcaagacttgaatcaaatatttctccacacactaaacattttactaatgttcttttagctgattttttctttggattctctttattttgaagtatacatccaaaattatatccataatcataagcctcacttaattcactatcactaggcttaaatttaattctaaatccatcatctacaaccttcatcctaagttgttttaatctttctataatgtgtggaactccttcaccactccatccataacttccaaaggcactagcaagttttcctccgtgtgttctagcaaacatctttatagttaaatcccaaattggctctaaagcctcaccaactatagtaggtgttccaaataaaattccatcagcgaatcctaattcttcaattactttttccttatcatcttctactaaatcgtacgatcttacatctatatctccgctatctttaataccttctgatattttaccagctaactctttagtatatccatacgcactaacataaggtataattactgtttttcttggatttggattaactacagtacaccattctttataaagttccatgatttcatcaatcctacaatctataactggaccatgcccagtacatatcatatcaatatctagatctttaattctatctaatgccttaaccatgtatggcgtcttaaaaggcccaatgatacaatcaaaataatatttagtagctcttaagtaaccctcattatctttaaccttactcaataatatttcatcaaaactatagtgagatccaaacgaatcgcaagttataagggttttatcctcttcaatatatgtatacattgtatctggccaatgtaaattaggtaagaacatgaaacgtaatgttttatctcccaattctaaagtatcattttcttttactgttatgctataaaaatcacgatttacaatattctttagaaatcctatagcaacttgtgtaccaactattttaatattaggattgatttcaataagcttttctatactcccagcatgatcaggttctgtatgatttactacaatataatcaatatcattaatatcaactaatttatttaatgcacttaaatacccatcccaaaatttagctttggcagtttcaaataatacagtcttttcccctgttttaagtaagtaggaattataagatgttccaaactctgtctccataactatatcaaatacttttaaaccaggatctaaaactcctgtccaataaaaattcttttttaattctaatatttccatataaaattcctccctataactttcatctatatgaaaatattatacctttttttatagtaaaactgtatcaaat

SEQ ID NO: 99 - DNA, 22633 bp, Clostridium beijerinckii
tatttagataagaatagtcaatcggtacagaattaaatttctttgtttgaatgaaaaaatttaaaactcttaaaataagaaaaatttttataaataaagtattaaaatttatattaaaatataaaaaaggagaacaaatatgaaacaagataaaaattatctatcagcaattttaattgtagcagccactggttttagcttatttattattatgcagaattttttaactaaaacaaatgagcgaggggttagtgctggattgccattaatgattccaacgttagcattacttattcctttagcgataataattataacaatgatttcaagggaagtaagatataagaaagctttggctaatggggttaaaagtgtaggacttattagaaaggtaacagaaaccgggaagaagtattcaagaaaattagaagaagttaaattggaacttgatgttttggagcagaatggaaataagtttttagggcaagtaacaacaggcattcgttatgcagaattagagttcttaaaagaaggggagccagttcctgttatttataaattggataataagcaagaaatatcaatagataggaaacccaatgtaaacgagcttaaggatagaataaacaattataagacacaaaataatatcaagtaattaaaagtaaatttaggtatatataatataatttttagcaaatactagctttatataaacaaacacacaatataaataaatataaagagaggagaaaaagaaccagcgtatatatgctggttttttgaaaaaatatgtttatacctaaaagagttatatttgaaaaagattcattagattatgagacagccaaaaatattttaaacaaatttaaagataaagaggatgttgaaattatcaatattacttcaaataaattgaaacagcatattcccggagaagatttttatgctcagtatagggaaggaaaaaagactttagtggttggaacaaagaagagtctgaaatttcaatcttgtaagccttcggctcattatcaattaccactaatatcagggtgtatggggcaatgtgaatattgttatttaaatacaaaactcggagataaaccttttgtgaaggtacatgtaaatattgatgagattttaagtcaagctcagaagtatatagatgaaaggttgcctgaaataaccatatttgaaggtgcagctacatcagatccaataccagtggaaccttatactcattcacttgaaaaggctatcgtattttttggtaagcatgagaatgctagatttagattcgtgacaaagtataacgatatagattcactattggatttagaacataatggtcatactgaaatgagatttagcattaatacatcatcagttattaataagtatgagcatgcaacagcttcacgtgacttaaggatagaagctagtataaaggcggctaaagcaggatatccaattggttttttagttgcacctgtgttcatttatccaaattggaaagaagaatatcatgatttattactaagtttaagtaaaaatctgccaaaggatttaaaaactccagtgacctttgagataatatcgcatcgttacactaaagcagcaaaaaatataatacttcaggtttttccagaaagtgaattaccaatgagtgatgaagagcgtaaattcaaatatggtcaatttggatatggaaagtatgtttatccaaaagaaaatatagatgaaatgaaacaattctttataaaagaaatagaggacttatttgaaaataaagaaattaagtatgttatatagataaataacagggcgtagatttaagtttatatactgaaatgcagtgtgggttttatatttaatagatgtaatattccataggactactggaatataattgaaaacactaaaaagcaggtatcatccaattcatcatacttaattttattttaacaagctaaattggaaagaactgctttttagaatcttttgcgataccatttatcttttcagagtaagagtatctgtacgttcaataagttcaaatacaattctaagttaaaaattttatattcattctaatctctccattaatttaaatgagtagcctattttttctatttcatctcttgataagactgatccctctggaggtctcacatttaatttaaaaactatagctttttgaccaacttcttgtttaaaattcacacgattcattttgatatccatattaagtgtatctgcgatagcctctgctgttgattcgtgtcctattgcagatatgaatccgtccttatataaaagcttttttgcagattccacatctatatcacttatcttataaacaccatttgttgtagcaacagttccattaaatatcgcaaccttcatgttcatcacctctaataatatattactacataaatcctatatttgtcagtcatttaatttatattgcaaaatcaatatattttcaaggattattagaatgatgtttgggaatataacatttctccatacttttgctacataataatatattattattgaagtagtatatatataatctagttagaatagttatcgtttccacattaatttctagtttcaaattttaatgttttggaagaggtaaccctaattagagaataggagagagtatattatgagtaaaatcaaaaatgaaattatgctaataacttatgcagatagtttaggaaagaatttaagggaattaaaggatgttttagatgaacattattctgatgcaataggaggtgttcacatactacctttctttccgtcatcaggagatagaggctttgcacctatgaggtatgatgtggtagatgaagcctttggtacaattgacgatgttaaagaaataagtaaggataaatatttaatgtatgatttcatggtgaatcatatttcaaggcaatctgaattctttaaggactttcaagaaaagaaagatgaatcaaaatataaggatttttttataagatataaagacttttgggaaaatggtgagccaaccgatgaacaagtaggtgcaatttataaaagaaaaccaagagcaccttactatgaagttgaatttaaagatggaagcaaggaaaaagtctggtgcacttttgcagaggaacaaattgatttaaacatggattcaaaagttgcaagagaatttattaaagatacactaatatcaatgtgtaaaaatggagcatcaattattcgtttagatgcttttgcatatgctataaagaaatcggggacaagctgtttcttcattgagccagaaatgtggaatttactttatgaaattcaagatacggttaaagaatatggggtagacatattaccagaaattcatgaacactatactatacaacataagatttcagaaaaaggtttttggatttatgattttgctcttccagttttggttttaaatgctttatattcagggaaaggtgataatttaaagagatggcttgatatgagtccaatgaagcaatttacaactttagatactcatgatggcattggtattgttgatgtaaaggacttaatgacagatgaagaaatagaagaaactaaggaagctatgttcacaaaaggtgcaaatgttaaaaagatttacaatacagcagcctacaataacttagatatttatcaagttaattgtacttattattcagcattaggaaataatgataaagcatatttattagctcgtgcaatacaattcttcgcaccaggtataccgcaagtttattatgtaggaatgcttgcaggtgaaaatgatattgagctaatggaatcaactaagaatggaagagatataaatcgtcattattactcaaaggaagaaatcagagaaaattttaaaaacagaaaaatagtaaatgatatgagagatttaatgaaatttagaaataataatcttgcttttggattagagggagaatgtattactgaagttgatggaagtaaacttgtaataactagaaaatgcggagaacacattgcaattataaaagctgatttaaaaactcatgaattcactattgaagcatagtagtaatttctaagtttatatcattgtagataatcaatagttattatttaatgaggaataattgctctaatccggaaaaaatacgtcatctaatttttagaatggcgtatttttagctaaataactatattttattaggaaaagcactttccctataactttttgggttattacctataatttttttgaatattttagaaaaggttagtggatcagtgtaacctactgaggcggcaatagccttaattgataaatctgtattttttagaagctcgcaagccttatctattttatagtttactaaaaattcttgtggtgacatattaatatttctcttaaaaatgtttgcaagatagcttctgtttataccaatataactggcgatatcatttatttttatattgtttgagtaattattttctataaattctatagatttttctaaatataattcagtacttttataggtttttatattataagagtcttttcttgtttcagctaatgcagacataaagaaatataaaagtccttcaagttttaattcattcgaataatccatttcttttaatttaagcatttcagaaatgtagttttttaaggagtcgtcttttgaatattcaaatataagattttcttcatttagatttgcataatttaaataagtttgagctttaacaccattaaaaccaacccacatataggtccaaggattattctcatctgctttataataagttaaaacatttggacaaatcaaaaagccttggtttttcttaagtttatatgttgtgttattaacagtgtaggaaccttccccgtcaattatatagtgaattaaatattgaggccttattgctggaccatatgaataaccaggagtacaattttctgaaccgcaatagcacagaaacaagtctacagattgtttcttttgtggttcaagatattttgatttgttactttcttcatatttaatttccatgatatttacacactccttaagttggtagtcgcaaaacataacatttctacataagcaatatacataacaccatataattcgctctttcatgtaattataatgaatacatagataaacttagtctaaaaaaatctatgaggaaatgataacattaacagaattatttatcaactagtttactaaagtaaatatgttctgaaaatagttgtatccaaagagtatatattaaatggaggaattaatatggcaattatttatgaaaagaatacaagaacatttcatctaaaaacccaaaaaacaagttatatagcaaaagtgttagaaactaaccatttaacttacctatactgggggagaaaaataaatactaataatttagattaccttattgaaaaaaatttatggggaagttttcttactaatacagatagtatagggacttttcaattggaagcggtgtctcaggaataccctggatatggaagtactgatttacgttcaccagcaatagaaattcagtttaaagatggaacttcagctactgattttaggtatgatggccataaaatttatagaggaaagccttttcttagaggattaccatcaacctatgttgaagctgatgatgaagcagaaactttagaaatatatttacgagatgaactaaaaaatgtaaaggttatattaacatatagtgtttttgaagaatttgattcaataacaaaatcagttaggatagtaaatgagagtgaagaaaatataaatatattgagagttttaagtgctaatgtcgattttaaagaagataattttgattttatacatttatcaggtgcttgggcaagggaaagacatattgttagaacaggccttaggtctggaatgcagtcaatagaaagtagaaggggagcaagtagtcatgctcaaaatccttttatggcattagcacgaaaaggtgcaagtgaacaaaatggagatgtttatggatttagcttagtttatagtggaaattttttagctgctatcgaagttgatatgtatagtaaagccagagctcagattggtatgaatccttttgatttcaattggatattagaaaaaaatgaggagtttcaggctccagaagcggtactcgtatattcttcagatggattaacaggaatgtctcaaatatataataatttatacggtaaacgcttatgcaggggtaaatatagagatgaagtaagaccaattcttataaataattgggaagccacttactttgattttaatgaaactagtataaaggaaattgctagtgaagcaagtgatttaggaatagaactttttgttcttgatgatggctggtttggaaagagagatgatgataccacatctttaggtgattggtttgttaatgaagaaaaaataaaaggtggacttggaaagctttctaaagaaataaatgaaataggattacaatttggattatggtttgaacctgaaatggtatctccaaacagcgaattatataaaaatcatcctgactggtgcattcatataccaggtagaaataggtcaactgctagagaacagcttatattagatctatcaagaaaagaggtatgtgattatataatagaaacagttagtagtgtattaaagaatgcatctatttcatatgtaaaatgggatatgaacagaaatatgagtgaaataggttcacttggactgccacctgaaagacaaagagaaacagcacataggtatatgctaggtttatatagaatactcgaggaaataacagcaaagttcccagagatattatttgaaagctgttctggaggcggcggtaggtttgatccaggaatgctgtactatatgccacaaacttggacaagtgatgataccgatgctatagaaagacttaagatacaatttggaacatccttagtttacccaagtgcttcaatgggctgccacgtatcagcagtgccaaatcatcaggttggaagggttactcctataggaacaagaggaattgttgctatgtcaggaaattttgggtatgagcttgatattactaagttgacagaagcagaaaaggaagcaataaaaaatcaagttgagttatacaagcaaataagggaaacagttcagtttggagacacttatagattaataagcccttttgaaagtaacgaagttgcatggatgaatatctcaaaagataaaaaggaaattgtcataagctacattaagcaatatgccgagccaaataaatggaataaaccgctaaagctcacagccttagaaaatgatgcgaaatatcaaataattgatgaagagatagtttttggcggagatgaattaatgaatattggattagttataccagagcttaaaggtgattatgcagctaaacagtggatattgagaaaaatataaaattttattattataaataatcagttatgaattttataataatagagatatgaagataaattgtttttgttaaatatgcatgaaagcaaagaaagtacattaatgtttattgagaagtatgtgagaattaattgaagagaacatttaacggcaggttgtttcgcttttgcttgaactaataaaattaagggcaggtagggaagtgggaccgcctgccatttaactttatctattagaagtattactggtttcactgaattaaacatatatcgagtttaagtttaaatattagtaactaaaatttacacaggtatctggagaaaatgttttcacttgtacacatttaaccatcaaacgattacattaaaccatttgaattagaagtacaatataatattatttatgtatggcaattgaataaataacagtgctaagaattaggatatgtattcaaacataattaaaaacagggggtcaaataatgaaaaagagcattaagaaatttataagcattattgcagcaactgtggctgtaagtactttagttgttgggtgtggtggaaccaattccactggtgggggctcgaaaggtgatgttactttaacttatgcaatctgggataagaatcaaaaaccaggcatggaagcaattgcagcagctttccatgaaaaaaaccctaacattactgtaaatgttgaagtcacaccatgggatcaatattggactaagttagatgctggagcttcaagtggaacactaccagatgttttctggatgcattcaagtaatttcttgaaatatgctaacggcgacgcgctaatggatattactgataagctaaagaatagcagcgatgtaaatctagataattttcctaaggatcttgtagatttatatactgcgaaaggaaagaattatgcaataccaaaagattatgacacaatagctctatggtataacaagactatgtttgatgccaaaggtataccttatccagatggaacatgggattggaacaagctattagaagtagctcagaaattaaacgatccagcaaacggagtatatggattcttatcgcctgtggatactcaacaaaattattatgacttcatctatcaaaatggaggagaagttttatctgcagataagaaaaaatcaggttatgataaaccagaaactaaagaggcaatgcaatttgcagttgattttagtcaaaagtataaggtttctccaacagtacaacaattcgcagatacgagccgtgatcaatactttgaatcaggaaaaggtgctatggcattttttggatcatggatggtaagtgaatttaaagcaaatgaatatgtagctaaaaattgtgatgtagctattcttccttttggaaagaaaaaagcaactatgtataacggattaggaaatgcggtttcagcaaaaacaaagaatccagatgcggcttggaagttcttagagttcatgggtacaaaagaggcaaatgctattcaagctgaaaaagctgcagcaattccagcattcaaaggaactgagcaagcatggatagataataacaaacaatttaatgtaaaagtatacccgcaaatgttagaatatgcacacatattccctaattctgaaacaagatcaaaatgggatccattagaaacacaaatattctctaaaatgtggtcaggtgacatatcagtagaagatgggtgtaatcaaatggctaaggaaatgaatgatcttttagctacagaacagtaggaatttaaatgataacagtcagtaaactagttgttggctgttatcgatccaagatataaatattataaagaggaggcgaaatatagaattatggttattgaaagagacacacgaaaagttacagatgaagttaagaaaacaaatagaaagaacttacgtgattatggttgggcttatttaatgatagctccaaccatattaggacttattgtattaaatatatggccattaattcaaacgtgctatttgagttttactaaaactagcggtttcggaaagaatcagtgggttggcttagataactatatacgtatgttttctgattcaagtgtgatgcatgcagttataaatacccttgaatatacagttatttcagttccagtaggtgtaattatttctttattcattgctgtattattgaattcaaagattaagggaaaaactatctatcgtacaatttattttcttcccatggtttcagctccagcagctatagctatggtttggagatggttatatagttcagattatggtttgtttaattatttactttcattagtaggaatatcgggagtaaaatggcttactgatcccaatattgctcttatatctgtaatagtagtaggcatatggagtactataggctataacatggttattttacttgcaggtcttcaggaaataccaaaaagcttctacgaagctgctgatattgatggggcgggacctataaggcaatttttcgctatcacatttcccttagtatctccaacaatgttctttgttgtagttacaacgatgataagttcacttcaagtgtttgattatatatttatgatgattgataaaactaatattgcaatggaaaaaactcagtcattggtttatttattctataagtattcctttattaccaatgataaaggttatggttcagcaatagttatgttattgctaataataattttaataattacagtgattcagcttaagttacagaagaagtgggttcattatcaatagttaggaggtgcagttttatgaaagaaagtctgaaatcaaaaaaaatcataattcatggtatattaataataggttccttagcaatgttacttccattcatatggatgataataacatctctaaagaatctaactgagtcgacacaagtcccacctacaattattcctagacagttcaagtttagcaactataaggatgtatgggacttactaccttttgggcgattctatataaatacaattctaatgcttatatttagaatactaggttcagtattttttagtgcaatggcagcatacgcttttgctagaataaaatttccaggtaaaaatttctttttcatgattgtacttattcaaatgatgataccaggacaattgtttatcatccctcaatataacatagtttcaaagttgggattactaaatacaatttcagccttagttattcctggaatagtaagcgcatttggtacctttttgcttagacaattttttattggaataccaaacgagcttgaagaagccgcaatattagatgggtgtaatagatggcagatattttggaagattatgatgcctttaactagatcagggttaatagctcttggaatatttactgcattatttgcttggaaagatctaatgtggcctttaatagtaaatgtttcgatagataaaatgccgttatcatcaggtcttgcatcactacaaggccaatattcaacaaactttccgcaactaatggcaggttcgatgatagctatatggccaatgcttttattatttatcatattccaaagacagtttattgaggggattgctagtactggttcaaagagctaagaatgattcatatagaagagttacagctatttggaaaagcgcaagaagcaataaatatacctaatatctgattatcaaagtaaaatcttaagaatatcggatggcaaagaatatgaaatataatgtaaaacaatttatggtatttttgagtgggattgtattaatgacgttaggagtatcattgacagttaaatcagaagttggagcgggagcatatgattctataaattttggattagctaacttgctaaaggttaatgtttcaatagcaatatggataacatcttttgttgttgctgttatttcgtcaatggtaagaaaaaggtttctaaaattcactacatttttaacttcaatactaatagggatttttacagatatgtgggtaatgataactgaaagaatagtgtttagcacaacctatgagaaagtagttatatatttcattggaatattcctaattgcaactggaatatcaatatatattattccgaagttgcctgtgaatccaacagatgacttaatggtagcacttacagaagaaaagagtataagtttaatgaaagcaaaactttctatagacggaatatgtattataattgcatttattttgaaagggcctataggaattggcactatagctgctacactttttgtaggtccgttaatagatattataaataaaataataacacgtatttgttcaaagagtttatcttttaaataaatattatcttaatatatttgcgtaagaatgtataaaaatatttcaaatcattaatttgctcatataattaaattacatagatatatccaaattgagcagtagaaaatatcctatttaaagaatttgattaaaggttgctttacttttacctgtcccaattgataattaggacaagataaagtgggagcagcctttaattaaatatataaatattcatatgaatatttatattatatggcagagaaatattattcagtaaaaatataagatatcattctaggtttgagtatttataccgaaagtcagaagggcttaatccttttgattttttgaaagttttagaaaataaaagtggatcggagtaaccgacagaacgagacacatcgcttattctcagctcagtgttttgaagtaatgaagctgctttttccattcgtagagaaagaagatattcctgtggagatttatttgtgaaatttttaaatattctatgtaaataagaacgatcgatacagatatgagcggcaatgtccttaatagctattttatctgcataattttgatgaatgaaaaataaggcttcttcaatataatttattggtcgatcggttgttatcacttcatgatttgggaagttctcgcatagaagatataaaaattcataaagcttagataaaataattaaatttctattagaggttgtttttgatgaatcaacaatattactaagtgaattaagcaaattactgttttcgggaaaagagaagataggattatctgaagatagagtcgttctctttaaataatcttttgcttttattccattaaatccaatccaagtgtacttccaaggaaatgctctatcagctttataatatattagaacatttggttcaattagaaacccttgatttttttctaagttataggtttttccattaactttatatgtaccttttccatcaagtacatagtgaatcatatagccacttcgtacagcagggccataggaatgttcactttcgcaagattctatgccacatgtataaaggttaagttcaatgtttgagtaatcattgttattagaaaaaacaaaagccatttttcatacctctcattattaaaatcatatattagtttatatatttttaagattttgaataaaaatattagttgtcacaggaatgctttttgagtctacatttttctatataaatatatcatgtaaacaattaaaattaaagtataaaatatttaattccatattactttaaaattagtgcacaattttaaaataatatattttgaatatttaaaccaaatagaattttaaagatagattaggagatacatatgaatataaagataaacgaagaaaaattactgtttcatttgcaggggaagaatactagttatgtaatgcaagtaataagagatgggtatttagcacatttatactggggtaaaagaatcaataaatatagaggaagtaatcaaatagtatttatggatagaggattttctcccaatccagacgataaagacagaactttttcccttgatactatccctcaagaatatcaagcatttggaaatggagattttagaattccagcgtatcaggtcagaattaatgatggatatagaatttcagatcttcgatataagggatatggattatataaaggaaaacgagagcttgaaggtttgcctgctacttatgcaaattatatagatgaagcggaaactcttgaaattattatggaagatgttgtgattgggttagaagttactttaagttatacattatttaaagaactggatgtaataactagaagtgttagctttagtaataaaggaaaagaaagtataaggcttcttagagcattaagtatgagtgttgattttagagatgatgattttgaaatgataactctatatggagctcacaataatgaaaagaatatagcaagaagaaagattgtaccaggagtacaacttatagatagctgcagaggagcaagcagcccacagcaagctccttttttagcattagttaggaaagacacaacagaagatagtggagaagtatatagttttaatttggtttatagtggaaattttacagcccaagtacaagtagattcttataataatactagagtatctatgggaataaatccttttgatttttcatggcttctagaagttggaaaaggattccaaacaccagaagctgtcatggtttatacacaaaatggaataggagaaatgtctaggatctaccataaattgtacagtcaaaatttatgccggggaaaatttaaaaataaagtaaggcctattctcataaataattgggaggcaacgtatttcgactttgatgaagagaagattgaaagtatagctaaagaaggaagagagcttggaatagaactctttgtattagatgatggatggtttggaaggagagatgatgataatagctctttaggagattggattgtagacaaacgtaagcttccaaatggattagaggcactggcaaataaaataacaagtattggaatggagtttggaatttggtttgaaccagaaatggtatctatagatagtgatttgtatagaaaacatccagattggtgtatacacgttccaaacagacctcatacattaggaaggaatcagcttgtgttagatctatcgagggatgaagtttgtagctatattatagaatcagtctcaaatatattatcaagcgccccaataacttatgtaaaatgggatatgaatcgtcatgttacagatattggctcagaaatattgacttgtgaaagacaggaagaagtaagtcataggtacatcttaggtttatatagggtaatggaggaactagtaagtagatttcctaatgtactgtttgaaagctgttcgagtggtggtggaagatttgatgcaggaatgctgtattatatgccacagacttggacaagtgataataccgatgcaatatgtagaacaaagattcaatatggcacgagttttgtatatccagcaataactatgggagcgcatgtttcaactgctccaaaccatcaagttggaagaataacaccacttgagacaagaggacatgtagctatgacaggaaattttgggtatgaattagatttaacaaagcttacaaatgaagaaaaagaaatggttagagagcaagttaaattatataatgatataagagaaatagtacagttcggagaattatatagaatatttaatccttttgatggaaatgaagctgcatggaattttgtgtctaatgacaaaagtgaatttgtagcaacatatgttagaatactatcacttccagcggcgccaattagaacaataaaatttaaagggttgaattcggaatatgattatcaagatatttcaacaggagagatatttggtggagatgaattaatgaatgtcgggattaccattgaaagggtaaagcaagattttcttagcattcaatggagattcaaaaagatataaattctgcaagatgtataatacgaaaggaagataaattatgggtaaacaagagaggtatctaaaaatttctgaagaaattatacagaatatcggtggaaaagataatatacaaggtgttgctcattgtgcaacaagacttagaatagttttagatgataatattaaagctaagatggataaactagacaatattgaattagttaaaggagtatttatagttggagaccagcttcaaattatttttggagctggacttgtaactgaagtttacgaggttttttctaaattagtaggaatagagaatatgtccttatctgacgtaaagagtaaatcagctcagaagcttaatccattacaaagaggaattaaatccttatcagatgtatttattgatattatgccgggaatacttgcagcagcattactaatgggattatcaggattacttggacaggcgggactatttggagaaaaatcaattattcaaatatatccagctttatcaggtgtaaataggtttgttagcatagtttcatctagtgtttttagtattctgccattaatagttgtgtattctgctactagaagatatggcggaaaaccagtattaggattggttatcggagcagttatgttaaatagcaatttagcagatgcctatgaagccgctaaaggtgctgtaaatccagatatcataaatgtcataggacttaatataaaattagttggctttcagggtggaataattattgctttaatgatgggatttgtggttgcaaaacttgataccttctttgatagaaaagttcacaacagcgttaagttactagtatcaccaatgcttacagtctttgttgcttcgttcttactattcacaattataggaccagtaggacgtgctttggctagtggagtaacaatgggattactatggataactcaaagttttggcatttttggatatatgttttttgcaggagtacagcaaataatagttattacaggaatacatcatattttaggtgctattgaaagtcaacttttagcagatacaggcacaaacttcttgaatccattaatgtcagttgcagtagcagctcaaggtggagcggttttaggatacttagcactgcattggaaagacataaaaataagagaacttgcaattccagcatttacttcaacattatttggaatatcagaaccagcaattttcggtgtgaacttaagaaacaaatttcctttagttgcaggctgcttgggagcagcaattgcaggaggttatgtttacattagtaaactagtttcaataggatttggaactacaggtgttcctggttttgcaatagcatcaagtgcaaataaggggtatgtaaattacataatagcacattgtattgcaatatcatgtggagcattatttacaatattatatggaaaaataatattaaaagggaaagtctctaaataagttaagaagaaagaaaatcccctaaaaggattaggtgaatgtttttaggggatttttaataatatagtgtttaaacattaaagtctttcatataatctccatgagcttcgatcatttcatcacacatttttataatatcatcaatggatagttcagcagctgtatgtggatccatcatggcagcttgatagattttacgtctatcttttgtaactgctgcttcaattgtcaataattgagagtttatattactcatattcatggcagcaagttgagttggaagttttcctacatgagttgcatgaattcccatagcgtcgaccatacaaggaacttctacacatgcatcagctggtaaattatcaatgagtccagtatttagcacattaccaccaattttataaggggtattagttacaattgcttccataatataagatgcatattcttttgaacgttcatgtgtaactttaccatcacgtaatatttcatttttctctttttgccaaccctcaatttgttcaatgcatcttcttggatattcatctagggggatattaaatctatcaattagttctggatattttgatttaatgaaaaaagaattatactccgcattatgttcgcttgactcagtgcaatagtatccaaggtgtttgatgtattcataacgaaccatgtctttatgtttttcttcaccagaattttttagctcagctctttttctaatctcaggatataaatcattgcctgctttatcatatatttctaataaccaacccatatgattaataccagcaattagctcttttctaccttctagtttatcttccatgcctaaatcttttaacaaatgttctgaacatacttgtacactatgacaaagtccaattgtttttactttagtgaaacgttgcataaaacctgtaagcatagccattggattagtatagtttaagaaatatgcatcagggcatacttcttccatatcttttgcaaagtcagccattataggaattgttcttagagctctcataattccaccaattcccattgtatctgcaatagtttgttttaaaccatattttttaggaatttcgaaatctgtgattgtgcaaggatcatatcctccaacctgaatagcattaaccacaaaagttgcatctttaagtgctagctttctattttcaacgcctaaaaaacattttatattagccctgccattatttatatttttgttgattgcatttaggattatttcactttcctttaatctttcctcatcaatatcataaagtgcaatttcactatctcgtagtgcttctgtgcacatacaatcacctaacacatttcttgcaaatacagtacttccagctcccataaatgtaattttcatataatcatcctccttgagtaattttgattttattataactaaattatataattgtaaatgtatactttctatgttctatgtttctaaaaattgtgcttatgttgaatgtttgtatatttttattaataaaaattaaaagtggatttatgatttttttagtttattacataaatttagttttaaagttggatagctatattcataaggtatagatatccaattcaagaattggacttattagatgaacatatttacaaggttgctaaaactttaagttcatatcttcactagaaatcataaatatatttgtgaagaaaacatttgaaaatgagctattaaaggttcttagctgtaggttgttccattttagcttgtcaaactgaaagttggagcatgctaaagtgggtataacctgctgcttagaaccttcagcgatattttcatagctttccggaatcaaaatatttattatttcggtaagttatcacataaatacagttttaaattaggttatctatatgtaagtaccatagaggaggattaattaatggaagcaaagtcagaatttacttcaaaatatagatcaatcagtactttaacaatatactatggaggtcatgaggtctgtgcgccatcccattcttttgggcctgccattcgccatcactatcttttgcattatattttaaatggaaaagggaaatattatgtaaataacaaatgctatgaattacaaggtggagaggctttcttaatttgtccgggtgaatctacctattataaagcagataaagaagagccttgggagtactgttgggtaagttttgatgggaatgatgctagcactattctaaaaaattgtggattatcgaaaaataatttaattttcaaggataacagtaatggggttttcaaagaaagactacttttactaatacataattatgaagaagatagtcacaatgagtatgctctcattggtcagttgtatatgtgtttttcgagcatgtatgatcaggtaaatataaaagaaaaaaacacttgtggatcatatgctgataaggctcgcgattatatttataataactttggctatgatatcaaagttagcgacatagctaaatacgttggaattgatagaacatatttatataaaatatttatggaggaatataaaatttcacctcagaaatatcttatatcttttcggttaaatactgctgtgaatttacttgaaaccacgaagatgaatataacagagatttcttattcttgtggatttaaggatactcctactttttataaacattttaagaaacagtttaatattacacctgtgcaatatagaaaaagtagcattgattatattaaactacctaatgaatagaaaagctgatgttaattaaaaactgcttagtgcaattagttataaaattaatatagtggtataatttaaatataaaactataattaattatctttaaattaaatggaaaaataacgtataaacatttttgcgtaaaaggagatgttatcatgaatgaagtattacaaaacatattaacaagaagaagtgtgagagcttttaaggaagaacagttaaaagatgaagaattagatttaattttacaggcaggtgtaaatgcaccaagcggaatgaacaaacaaagttggcagttcacagttgttcaaagcaaagaaaagatggagaagcttgcaaaagtagttagagaagctttgaaaagggatgctggatataacttttatgcgcctccaactttaattatgttgtctaatgatagagataatacaaatggacttgcggattgttcttgtgcattagaaaatatattcttaatggcaaattcactaggaataggttcatgttgggttaatcaattaaagaatatttgtgatgaaaaagaagtaagagaagtattaaatagctttgaaatacctgaaaatcatattgtttggggaatggcagctttagggtatccggctaatacaccgaaggcacacggaagaaaagatggagtgattaaattcataaagtaatatctattaaaacaaatatcagaatcaagatgtgtttcaatatagagaaaaataagcaaaatatcctgagtctaggaatttgcttattttttattctgtaggaaatctacacatataaaaagagtttgaagcacaagacagaatttatctaaagtcaccttaaactttcttctttaaaaattagtaataattgaattgtgaataaattactataaatagttagaaaatagaatgtaataatatatcaaaaataaaaatttactattttattttttaaaataattattagtatgtatatttatcatcaattgcatatatatgtaatttagtcaaaactttttaaaaaatacaaaaaagtattgactatataaaaacagaagaatatacttataacatagtaaactgataagaattatatgagaaagtttaaggagtggttggaatgtcaaagatatataagaatttagcagaattagtaggtaaaaccccattattagaagttgcaaattatagtaagggaaaagatttaaaaggaacaatattagctaagttggagtattttaatccagcaggaagcgttaaagatagaattgcaaaggctatgatagaagatgctgaaaacaaaggtttattaaaaccaggatcagtaataattgagccaactagtggtaatacaggaatcggtattgcatctgtaggtactgcaaaagggtataaggttataattgttatgccagaaacaatgagtgtagaaagacgtagtcttataaaagcttatggagctgagatagttctaactgaaggagcaaaaggaatgaaaggagctatagctaaggcaagtgagttagcaaatgagactccaaattcatttataccaggacaatttgtaaatccagcgaatccagaagttcataaaaatacaactggtcctgaaatatgggaagacacagatggaaaagtagatatatttgttgcaggtgttggtacaggtggaactgttacaggagttggagaatacttaaaatctaaaaatccagatattaaaattgttgcagtagaaccagcggattcaccagttttatcagaaggtaaatcaggtcctcacaaaatacaaggaattggtgctggatttgtaccagacgttttaaatacaaaaatatatgatgaaattataaaaataacaacagaagaagcattttctgctgctagggaattatctaaaacagaaggtttacttgttggtatttcatcaggagctgctgcatttgctgcaacagaattagcaaaacgtccagagaatgcaggaaaaacagtggtggcattattaccagatacaggagaacgttatttatcaactgcattatttgaagataaataagaatatataggaaaagcatttataaactcaattcgcttagttttaagtgaattgagtttattttcggtatataagattatagatttggtatagataaaccaacaataagctatatgcataagttcaacacttatttgtctatagggttccaacttgaaaatttgagatatcacaaacatagaaattggatacatatttgtgtagtaggcatttgaaaataagctgcttaggttcttaaggggaggttgttccatttactgcctgtcacactgaaagtgggaacatgcagtaatgggtgcaacctgccatttagaacctttcagcgaaattttcatagtcctatggaacaaatatgtattcaatttcgttggggattcacataagttcgattctcattgcggaaccctatatgtgattagatgcgaagtattatataaatttatctaattaatttatataactcactttcttctttactaattctcttttctatagcaactaagattttttttgtttcgcttgtaaaaacttcattgccttcagatattattttactctttgtattaaatttatttttataatttgtaaatgtatctgaaattccacccatttcattaatatatgaatttgctaggtttttaagtttattatcatctccattaagtagattagggtataaaaatttgtcctctgaacttagatgaattttcaactttccagcaagtttgtttatatgagtagttatatccaaaagatcagattcgaattttttattattaattgactcatttatataatttatttcctcaaaaatacctttatgttctctcatcaaattatctatattcataattaacacctcattaatatttgtaattcattaactaaagtatagtttttatatgataataag

SEQ ID NO: 100 - DNA, 22013 bp, Clostridium beijerinckii
aagttggacaaatatctaactatggaataattggaatatcgagccacaagattacaaggatacttttttgctttttttcataaccatatttacccataaaatattctagcttttcgaactcacgttatattaaatcttctaatggatttgatgaaagggtgaaaggttatttatatgttaaggcttcaagtgaagacttgaatattaataaagaatatgtcgtagattttagcaatgattgaaaaacattaattaaatataaaaagatagcaaaggacgattcctttactatctttaagtatagtattaagacaggaatacaaatatattttataagctgctttagatgcaaatagttttaagcagcttcactttttgattctaaaatatctttttcttgaagcttttcattctttctttcaataaaatctctaacaaccttaacagtttgtattattaaagttggaatgaaagcaaataagtgaactaacattaattcattactagtaagtggagttatttcaaataatccttgaagtgctggtataagtaaaactgcatttacaagtacaacacctgatataaatgcaatccaactgaatttgttattgaaaactccaagagcaaagatggattttttgcctcggcagttaaatccgtggaataatctagctaaacataaagtgctaaatgccatagtcattgcaagcccatggcttcctgtagctaaaccaatatgataagaaaccatagtgaatattccaatcagcaaaccttgactacaaatatctattataaaatctttagttaaaatagattctttggcatctctaggtttatcttttaaaacatcttttttagatttttccataccaattgcaatggcaggtaaactatctgttaataagtttatgaataataagtgtacggctgcaaatggaacaggaagtgcaaatattgatgaatatagtactgcaagaattccagaagtattacctgaaagtaggaattttattgaattctttatattagcataaatatttcgcccattagtaactgatttaacaatagtagcaaagttatcgtctgttaaaatcattgaagcagcatcttttgaaacttcagtacctgttatacccattgcaataccaatatcagcttgctttaatgcaggtgcatcattaacaccatctccagtcatagctacaattttacctttgttttgccatgctttaactattcttattttatgttctggagatactcttgcgtaaacggaaatgtgctttaattttgagttgagttcgtcatcggacattttatcaagttccaagccttctacagctaagtcaccatcttgtaatattccaatttctttagcaatagcagaggctgtaatcttgtgatctccagtaatcataatcggcttgacagaagctttaatacaatcactaacagctgctttagattcttctctaggtggatcaatcattgaaattaaacctaagaaagtataatcatattcatcatctaaagtgagttctttattttcattaagctctctataagcaaatgctaaaactcttaatccttgagatgataattctctattaacattatttatattgattttatcattgttggtgaagtctactactccatttgaagtctttattgaagttactctattaagtaatacatcaagagcacctttagtgaccattatatactttccatcaatttcgtgaagagtactcataagctttctgtcagaatcaaaaggaatttctttaagtcttggataagtgcttctacattcaagttcatttaaggagtatttatgacccaagtttactaaggcaacttctgttggatctcctatctcagcaccatcttttgaagtagaatcgttacatagtatagaactagttaaaaggaaatttgaatcaaaatttttgaaatctattttagtactatcaattaagttgttatcaacgaagatctttttaacagtcatcttattttgagttaatgtaccagttttatcagaacagataacagatacacaaccaagaccttcaacagcttttagctttttaatgatagcattctctttagccattgattgtgtgcctatggcaagtacaattgtaactattgagctaagggcttcaggaatagcagcaacagcaagagcaacggcaaacattaatgaatctaatagagcaatacctctgtacatacttaatccaaatacaataacacagataccaattatcccaaaggctaacttcttagaaaactcatccaaggaaatttgaagcggggtacttttttcttgagtttcttccataagagtagctattttaccaagctcagtattcataccagtattagttacaagaacagtagcacgtccataagtgactagtgaactagagaaaaccatatttttttgatcacctaaagcaacttcatctttgtcaataacatcagagaacttatccacactctcagattcaccagttaatgagctctcattaactttaagagagaagttttctaaaattctaccatcagcaacaactaggtctccagcctctagtatcaaaatatctcctggaactacagttttagaaggtatttcaattttaactccattccgaataaccttagcattaggcgcagatagcgcttttagactagctagagattgttcagctttaacgtattgaacagtacctaaaatagcattcatagttataacagctaaaattacaaaagtactttccatatttccagtcatagctgaaattatagcagcagcaattaatatgattactaataagtccttaaattgttctagaaatacagataaaatgctttttttctttttttcatttaaggtgttttcgcctacagagtctaatattttattagctttttcgctcgtcagcccctttaaagtcacatcgaaggttttaagagattcttctactgttttagaaaaatattttttcattatggcatcttcctttcaaagaaaaaatttaataagtatataattagctaaagtctataaagtgaacattttcaggtagagtttaactctgactgaatttagttgaacatataccctcaagtggtacatcgtccagaaatgtacagttgttataccctaattgaataagggggaatgttgatgttacggatactaactataggataaattaacaacaaaaaagacttttaatataacttcaaattgttgaagttatattaaaagtctcgttacctgttagggtatataacaccagactaacaatatagtcgcgattgttgatgttatatttataactactcccttttaatatagtgatttattttatataatgattatagcattttatatggttttagtcaatatgctaagagttattttatacaatatatattaattatactccataaaaaacaaataagtgaactactgtttaaagtatatgtaaaattataactattgttatcacattggttaatatgtataattataactgcacacgttaacaatattatgttatgtatgtaattatatatttaagccatagggggacgttgaagtgagattaaaaaaagtaaaagatgtaaaaatcataaggagcataattataatagtaattttatctttgatatcaacaattactattggagttttgggttatttaaatacatctaaaatgtatgatgccaacttgataatgtataataatgttattccaaaacttagtgattggggtgatgttaatggcagtatgggtgttttaagaaatactttaaccaaaataatagataggccatttgatgaagcaaatgaaaaggcgatgctagaattaaatacaaatataacagaaatagtgaataggcaggctaaagaatcagaaaataattcagaagaacaccaattagttatgaaatttaaagaagaatatgaacaatattattcgtacatacctggtattattgatcaaagaaaacaagacttaactccagataaaaagattacaaatgatgctatgggagtatatggaaatcaaattgctcaagataataaggcattggttcaacttcaaaaggataaagctacaaatgagattaataaatctatgagtgcatatagaaaaaatatatttatgtttataagtatattgagcgtatcaattctagctctagcgtttatgtcaacatatataatattcatgattaagaattcaattaaagaatttgtacataaagtttcaatcttatcagaaggaaatttcactgtaaagtttgatactgaatccgcaaacgaatttggagtgatgcagaatgcattaagcaagaccataacatctattgcatcaattatatctacagtaaaggaagattcgaaccttgttacagagcaatcaatagagctttcaagggtttcagaaaaaatgaagcattatataggagatgtatccagttcaattcatgatatagcagaaggatctaatgaacaatctgaaagacttatgtcaataaacaataatttaagttcttttagtgataaattggattcaataacaagatctgtagagaaagtggataaaagtactattaatattagtaatgaagccaatattagcgatgaaagattgagaaatataggtatatcgataaatgaaattgcagaatcttataatgaagcacaaaggaaagttaataaattaagcctaagtgtaaataaaataacagaaataactaatatgattaatgaaatagcagatgaaactaatttgttagccttaaatgcagctattgaagcggcaagagcaggtgaagcaggtaagggattttcaatcgttgcagatgaaattagaaaattagcagagcaatctaaaagttcatcagaagatattaataatttgctaggtgacataagttccgaaactaaattagttgaagaaacaacaggtattgctaacaagaaattagaggagcagattcatacaatagcatcaactatagtttcatttaaagaaatagtagaatctataggtgatatagtacctcaagttcatgagataaatgatgcaatagttgatattaataatagaaaaaataatatagtagaaaatgtggaattatcatccgctgtacctgaagaaaattctgctgcatcccaagagatatccgcatcagcccatgaaatggataattcagcatataaggtttctaaatctgcagaagaattgaaagatataatgcagcagattacatctcaaattgagaagtttgttctttaaaataaaaataattaaatatggataaatattagtttatcatgggaatctctatgctattagaattatagaggttctcatttttattacaaatttaagaaatttaatatatagtaactaagaataaatgacttgattaaaaaactagaaattccattgatgtaagtttttatatgattaaatttattatttaagttataatatataatagtatttattgtgtatggaggtttttttatgacaggacttgtacttgaaggcggagcattcagaggattatttacagcaggtgtgttagatgcatttttagatataaaggcagaaataaaatatatagtaggagtatctgcaggtgccactaatgcatattcttatgtctctaggcaaagaggaagaaacttagagataatggaaagatttatggataataagaggtatatcagctatagaaatttaattagatgtaaatctcttatggatttagaatttgtatttgacgagatacctaataagcattgtccatttgattataaggcgttttatgaatttgatggaaagatgttagcaggtgcttttaatattgagactggaaagaatgagtactttgataaagatttattggataagagaaattcaattcttagagcaagcatagcgataccattagtatttccatttgaaaagatagaaggacaatattacgctgatggaggcctttcagagcctataccaattaataagtcaatagatgatggtaatgacaaacatataatagtattaacaaggaatgaggggtatagaaagacaaaatctaaagccaatgaagtaacttataggctttataaaaataagtatccaaagcttgcagatgtgctaaaaaataggcatattaaatataatgagcaacttgattactgcaaagaattagaggaaagtgggaaagcatttataataagaccaagtataagtatggatataagtagatttgagcgaaataaaagtaaactaaaagcaatatatcaaaatgggtatgatttgattattcaaaataaagaaaaaatactcaaatatattggatagtatttaaatataatattttagagaagtatttttaaatagataaattatatatattatgaatgcttataaatagaatagaatgaattaaaaaatctgcaaatgtaggattctagctgtttttgatgtataatgtactaataaaatataaaattttagacaataaagcgaacaagggagatatatatgtttacatccaatagcaaaacacctaaagtatatcatcaagttatagaacaaattaagaacaacataaaaagtggtaaattaaaaaagggagatagattgccatcagaaagagaaatgtcagaatctcttggagtatcacgtgcatccataagagaggcattgagagcattagaagtggtaggtcttgtggaaagcaggcaaggcgcaggaaattatataaaaactaattttgataattcattatttgaacctctttctgtcatgtttatgttacaagaaagttcaattgaagaaatgtatgatttaagagaaacgctggagcttcgttgtgctaggttatccgctaaaaatatagaaaataatgagctagagcttttaacagcaatattagatagaatgtatatagcagaaaatgaggacgagagtcttgaacttgatattaagttccattatttaattgcaaaaacctcaagaaatactttacttataaatgttcttgaagttatatctcagcttatggatgaattcattcgaaaatcaagagcgcaaattttacatacaggaaaaactagggagaatttattagagattcatgagaatttagtaagagctttgaaatgcagagatgctagtaaagctcataatgctatggtagagcactttgatttaattcgaggatcctatgggtataaaaaataaaaatatattgttttaaaaataagatggataaaagataatcgtcagtgaggttattttttttatccattttatttttgttatattttaaacaaaaaatgcttaaatacgattaattaaaaatataaattaaatttttattaaattttatatgggcaaaaagatatagaatataaggcactaaggagtatattggaatagagtcaatgtaaacattttctgttaaataaataacaatactttacaaactatattttggaaagtataattaaattgaaattggtcataccaatttgatattggtatgacatgttggaaaagaggaggaataaattagttttattgtgactctagcaaaaactattatatatagcggaataattaaactgatattggattttatcaagaaataaattgaagtaatttttaaaagtttgtttattccacattgttttgacaaaactactactatcactttgccaatcagtgtttggaatttaaaatacagttttaggaggaagttatcatgaatattttagtttgcattaagcaggtgccaggaacatctaaagttgaggttgatccagttacaggagttttgaaaagagatggcatagactccaaaatgaatccatatgatttgtatgctcttgaaacagctcttaagattagggagagtgaaggaggaactgttaaagtcctaagtatgggacctaatcaagctttaagcgtaattaaggaagcctacacaatgggagctgatgaaggcacattattatcagacaggaaatttggaggagctgatgttttagctacatcgtatacaatagctcaaggcgtgaaaaagatgggggatttcgaacttattatttgcggtaagcaaacaacagatggagatacagcgcaggtaggatctgaaatggctgaatggttaaacataccacatgtagctaacgttaaggacatagttaaagtagaagactcaacaatcacagttgaaatggatatgccagaaagtattgaaacagtaaagatagcgtacccatgtctaatcactgtagataaaggaatttttgaaccaaggttaccttcttatagaaaaaaactttcaactaaggacagagaaataaaaatattaagcctaaaagattttgatgataaagatgagaagaattatggacttaatggatcaccaactcaagtagagagaatatttccaccagaggttaataatgatagagaaatgtggacaggcagttctggtgaattaagtggaaaaatgggagagaaattaaaagaattgaaatttatttaggtattaaatattagtaaagatatctcacaaagataattaaaggggagaatgcgttatggcaaagttagtagtaaatcaagagaaaatattagatattgatgagttaattaaaatatgtccttttggtgcccttgaaaataataatggagttgttgaaataagtggagcatgtaaaatgtgcaagctttgcgttaaaaaggggcctaagggagctgttgaatatatagaggaagaagtcaaagagatagataaaagtctttggaatggaataggcgtttatgttgatcatgtagatggagaaatacatcctgttacttatgagctaataggaaaggcaagagaattagcaggaaagataaatcatccagtatatgctgtatttatcggaaataatatttctcataaagctgaagaattattacactatggtgtagataaggtatttgtatatgatgacgaggaattaaagtattttagaatagaaccatatacagctgctttcggagattttataaataatgtaaaaccaacagcgattttagttggtgctacaactataggtagatctttagcgccaagaatagctgctagatttaaaactggacttacagcagattgtacaatattagatatgaaggaaaatacagatttagttcaaattagaccggcatttggtggtaatataatggctcagatagttactccaaattctagacctcaattagcaactgttagatataaagttatgacagctccaaaaagaaatgatgatatttcaggagaaatagtagaatgttctatagataaagaaaaacttttatctaaaattacagcgcttagtataaagaaaaaagatgctgaagtaggaataagtgatgctgaagtaatagttgcagcaggaagagggattaaatcagaaaaggatttagaattagtaaaagaattagctaaacttttaggagcagaatttgcatgtactagacctctaatagaggcaggctgggttgatgcaaagagacaaattggattaagcggtagaactgtaaggccaagacttatcatagcttgtggaatatctggagcagttcaatttacagctggaatgaataattcagattatatatttgctataaatgctgatgataaagcaccaatatttaaggttgctcactatggagttgttggaaacttgtatgaaataattccagaattaatagaaaaaataaaaatggctaaggaggcataggtgatgagttacaaagaagttgaattaaaagattatgaatatatattatctatagcagagaatgatttggagagagttttctttagagaagaaataaatgaagactatagccatgatgaattaggcgggattaagaaaatgcctgatatagttattcaaactataagtgctgatgaagtttcaaaagtaatgaaatatgcctatgagaataatattcctgttactccaaggggatcaggaacagggcttgttggagcagcggttccacttaaaggtggaatagttatagaccttagcagaatgaataaaattttagaattagatgaagaaaaccttactcttacattagaaccgggagtattacttatggagataggtaaatatgttcaagaatttgacttattttatccaccagatccaggtgaaaaatcagcaacaattggaggaaatataagtactaatgcaggaggtatgagagctgtaaaatatggagtaactagagactatgtaagaggacttgaggttgtattaccaaatggtgatatagtaaatctaggaggaaaagtagttaaaaatagctctggatatgcactaaaagatttaattgttggttcagaaggaactttaggaatagtaacaaaggctattttgaaattgttaccacttcctaaaaaggctttaagcttgcttattccttttgaaagcctcgaaagagcgatagagactgtgcctaaaataattaaatctaagtcaataccaacagcaatcgaatttatgcagagagaagcgatacttgctgcagaagaatttttaggaaaaagttttccagataaatcatctgatgcatacctattattaactttcgatggaaattccacagaagaaattgaaaaggattatgaaaacgtagctaatatttgtttagaagctggagctttagatgtattaatctcagatactgaagaaagacaagaatcaatatggtcagctagaggttgtttccttgaagcaattaaagcattaactactgaaatggatgaagttgatgttgttgttccaagaaatcaaataggaaagtttgtaaccttcactcatgaacttgaacgtactgctaatataagaataaaaagctttggacatgcaggcgatggaaatcttcatatatatatattaagagatgaccttgaccaagaagcatgggaatctaaattaaaagaagttatgcaaataatgtataataaagctaaagaattagatggccaggtgtcaggagaacatggaataggatttgcaaagaagggatatttaaaagaatcacttccaagtgaatgtattggaataatgcaaggaattaaattagcttttgatcctaagaacatattaaatccaggaaaggtatgtgaatagaataaaaaagtattcaatttgaatactagcaaattataaatataaataatttaactaggctttatttacaaatcaaagctgtcttaaaatagaaatttaatttctattttgggacagcttatttttatacataaaaaagcaaactcacaacaatatacccttttatgtataatttatttatagataaaaaacaaattaatacaaaagaattataaaaatggcattgagatttataaattaatagttctcattaaaagaaaaaattaaaatgaataaaacctttttactaaattaatcctcttatattataggagctccaaaaggaagagaggtgcaaagatggatatagaagaaatagtaacgcgttgcaagctcggagagaaggaagcatttcgcgaactttttcaaattgtagaaaaaaaggcgttggctactgaatattttttatcaggaaatagaggaattgctgaagacatactccaagagacatatatgaaatgcttcatggaaataaataaacttcaagagccacaagcgtttaaagtatggttttttaagattcttatgcgaacaggctggaaaatgacaaaaaagcagtcagggttagttccgttagaaataacatcagaaaatgaaggtttattttttgatgagaatcaagaaaaagaaaacataattgatagatatgagataaaacatgtaatgcggagtgcaatcaacaaattaagtcctaatttaaaaacagttgttattctttattattacaatgacatgacaatggaaaaaatttcaaaggttacaggttgttttaagactacggtaaaatcacggttgttttatgccagagctgctttgaagaagcagttagccaattgctttgaggtggaaagtgggatgagcataattaaatagaaaggagtctaattaaaaatgaaagataagggttatttggataaggtaataaagagtgctatagatgatagtatttttaatattaaagcttcaagagatatttttaatgaggcttggaataataaggagaaagaaatgggaaagaaaaagtattttagtataaaaaatataagaaaggaggtattagttcctatatgctgtgtattatttgctattgttggtatttttacattttcgccagtagcaaggactgctgcgcaggaagcattgaagacaatatttttacttgataaatcaggtaatattattgagaaatcagaagatgaggcagttgatgatgttaccgttggaggttttgagataacggataaaaacaagaatgagatagaggggaaattcggatttgaatttaattttcctaaaaaagttgggaatttctccattacagaaattgcaggatatcctgtgtctccagtagcgatgatgactgttaaagatttgaaatataaagatgaagaaaactcattagataagtttagaaaagcagtaggagatgatcaaatatttaatgagcttagtaaagattataagattataagaaacatttgtgaatcatatgaagatagtgagaaacataaattttttatatacttatcaaaatttagtgaggattcagaaatgaatagtgttaaagaaacaactattgataatataaaatgtagagttttagaagaaaatagggctaaatatgaaagaagtgaaaatggcgatgatgtgacaaagaagcctattagtgttaacaaaatatattatatggtttgggattataatggagtaagctacaggatatacattggagaaaattctgcagatattgatgtagcaacacagtttgcaaaagattatataaagattctaaaacaagaatagaaaaaacaaagggtaagggagtgatctcttaccctttgttttgaaagggatatatgaactttaataaatataatataaaatctatgatttatagaataagttaggaaattgaacctttaggtgtttaagattaaataatcttctttaaataaatcaatattattttaataaaactgtatgaaataataaaaaatacattgaaaaataatttgaaataatataaaataagaatatagtaataataaatgataataaataagcagaaaggagaaagagaaatggatgaattaataatgtctcgaagaattgaaaatttaaagaagaagatgttatccgaaaaaagatatgcatctattgaacaagcacttataataactgaaacttataaagagaatgaagataagccagttattataaaaagagcattagcattaaagaattctctttcaaaattagaaatcggtgttgatgatgaagagttaatagtaggtaaccgtactaaaggggttagatatggtgttgtttttccagagagcggtagctcatggatcgataaagaatttgaatctctaccaactagacctcaagacaaatttaatgtgaatttaaatgatatagaaacatttcgaaaagtgattaaaccatattgggatggacactcattagagaatgtcattagacagagatatggaaaagaaattgatgaaattgcaaaagtggtaaaaataaatcaaaaagaccatgctcaagggcatatttgtccaaattgcagagagtggcttgctttaggcccagaaggaattaagcaaagagccattgaaaaaatgaagaattctacaaaagaaagtaaggaattttatgaaagtgtaattattgttatggaaggtgctcaagaatttatgatgagataccatgacttaatgaaagaaaaagctgagtcaatctgcgaggaagaattagtagcagatatgcttcaagttgcagagatttgtaagaatatctctagaaggccggcacaaactttccatgaggcggtgcaagcaatttggtttttatttgttatacttcatatggaatcaaatgcatcatcattctcaccaggaagaatggatgaatttttatatccatattataaaagagatatacatcttggaaatatagatgataaaaaggctttagaaataattgaatgtctttggcttaagtttaatgaaatagtttatttaagaaattctcatagtgctaaattttttgcaggatttcctataggatttaatattgcaattggtggccaagatgaaaagagtaatgatttttcaaatgaattatctttcttattcctaaaagctcaagaacatttaggtctgccacaacctaacttatctgtgagacttcataagaacacatcagaaaaactattgaaagagagcataaaagttgtggcaaaaggcagtggaatgccacagttctttaatgatgaatcagtagtgccgtctatgatagacttaggaattaaagaaaaagatgcaagagactatgcaattgttggatgcgtagagcttacaactcaaggtaataatcttggttggagtgatgcagcaatgttcaatttaaataaggttttagagatcactctaaatggtggaaaatgcttaatttcaggagattcattgtctcaagacttaggtaatctaaccacttacgaaaagtatgaagatttagaggaagcatttgctaagcaaatagattatttcattgatagaatgattttagcttgtgaacaagttgaaaaagcccacatagatgttttaccttcgccattcttatcgtcagttattgacgactgcattgagaaaggtgtagatgttactgcaggtggagcagtatataatctgtcaggaattcaaatgatacaagttgcaaatttagcggatagcttggcagcaataaaacttttagtatatgatgaaaatagaatttctaaagaagaattgttaaaagctcttcaaaataactttgaaggatatgaagtgataagggctatgctattaaatcgtgcacctaaatacgggaatgatattcaatgggtagatgaaattggtgctaattgggcaagatatttcaatggaaagcttaaatcttatacaaactatcgtggaggtaaatatcatacaggaatgtatacagtatctgcccatgttccaatgggtgaaaatgtaggagcatctgcagatggaagatatgcaaaggcacctttagctgacggtggtatgtcacctgtatatggaagagatattgcaggacctactgctgttttaaagtctgtatcaaaattagataatgtattaactactaatggtggtttattaaatatgaagttcttacctgagttttttaagcatgagattggacgggataagtttgcaagattcttaagaacctttgtagatttagaaataccacatattcaatttaatgttttacgtaaagaagatttattagcagcgcaaaagtatcctgaaaattatcgtagtttaactgtacgtgtagcaggatatacagcatatttcactgaacttgcaggagaattgcaaaatgaaattatagcaagaacaagttatggggatatatagcctatggaaaaagattattcgtctttaacaggaaagatttttgatataagaagattttcaacacatgatggagagggaataagaacaacgatttttttaaaaggatgtccgcttaaatgtgtttggtgtcaaaatcccgaaggtatttctccaaaggaacaattaattcattttgaaaataaatgtattaattgtgatctatgtgttaaaaaatgctctaataaatcagttatacgagaaaataataaaatatgtgttgttcaagataaatgtatagatgaacaaaatgaaattgttacagatatttgtccgactggtgcgttaactatggattctaaaaattatactttagatgaagttatagaaatagcactgaaggataaagcgttttttaaatacggcggtggggtaactttatctggtggagaaccattgtaccagaaagaatttgtagttgtattacttaaaatgttaaaagaagctggaataaatacagcgattgaaacatctttattcgtccctactgaatatataatagaagcgctaccgtatctagatacaatttttgcagatttaaaggtatttgataatgataagcataagatttttactggcgtaggtaatgaactaatcaaaaagaacatcaagtttattttagaaagcaataagaaagataatgtgattatcagaactccgctaatacctcaatttacagcaaataaaattaatattcatgatataagtggatatatttcaagcatttactcaaaagtaaggtatgaactattaaattataatccacttgcaaaatcaaaatacaacttaatcaataatttagattattgttttgaagagaatcctaaaatgtatactgagactcaaatggaggaattttatgatatagcttattcagcaggaataagaaatttagttaagtagttgtttcggatattcattgattgctgaataaaaaggtataaataaaaatgtttttattctaaagttctaaaattcttaagaatatatattgtttagaatattacaatataagaatatatattcttggaataggagtattgttttatagtatttataacgcatttacttaatttaaatatagaaattaaaaagagagagggagaagaaaaaatgttaatgttaattgatgatgcaaacttagatgaaattaaaaggatttatgaattttacccatgtgatggggtgacaactaatccatctattttaaaaaaacaaggtggaaatcctatggaggtattaaaagcaattagagaatttttaccagaaggggcacaattacatgctcaagttgtatcgttaactgctgaaaaaatggttgatgaagcacaacatatgattgaagtacttggaaaggacacttatattaaaattcctgtaacacctgaaggaataaaagctatgaaattattaagtaaggaaaatgtaaatattacagcaacagctatttatacttcgatgcaagcattcatggcagcaaaagcaggggcaagatatacagcaccttatgtaaataggattgataatatgggagctgatggagttcaagttgcaaaagacattcatgacatgtttaaaatgcatggattaaattcggatgtattagctgcaagcttcaaaaattcacaacaagttttgaatttatgcaagtatggaattggatcagttacagcagcaccagatgtagtagaaggattaataaaaaatgatgcaactaaaaatgcagtagatgtatttacaaaagatttctatagcttggttggtgaagggaacacaatggaggggctataattcaggaagaagaacatttaagggaaataatttattgttctttttactatagactcacacatacaaatattttgacatataatgaactagtatcattacatggagttgaaaatgcgtgatatacgggctgattttagctggaggtaagggcagtagactatatcctctatcaagagccgatcaaccaaaacaatttttaaagctaattaacgataaaagtttcttagttaatactgttgataggataatgccattaatagacagggataatatttatattgtaaccaatatggactacaaagaaaaagttaaggatgaactaataggaattagagaggaaaatatttttgtagagcctgctaataaagaaactgcaacttgtataggtttgtctgcagtaaaattattaaaacaagatgctaatgcagtaatggttgtattaccatcagatcactatattcagggtgagaagaattatatagatactttatcacaagcaatagagatggcaaataggagaaggtgtatcgttacacttgggattgaacctagtagacctgaaacaggatatggatatatagaaatgggggaaagaactgctggaagcataccaacttatagaattgcaaggtttacagaaaaaccaaattcagaggtagctaaagatttcatattaaaaggaacttatttatggaattctgggatgtttatatttagggccgacgttatactaagagaaatagaaaaatacttgcctaaattgcataaatcactgatggagatatataaaaatttaggagaggaaaatgaagagagtgttataaaagaccaatatgaacttatagacggaatttctatagactttggggttatgcaaagaactagaaaagcctatgttattaaatgtgattttagttgggatgatatgggaagttttggcgctttaagtaggctactgagcacttatagaaataatagtatatctaagaatgtttatattgacgattgcgagaattgctccatatttggggacaagaacctgataattgggtttggaataaaagacttagttgtagtagatgctggagatgttattcttgtaatggataaaaataaggatcaggaaataaaacatttattaaataggctcaacgaaaataaagaatataataaatttctatagtaagtaagctgtttcaatatatcttaatgatactgaagcagcttatttatctttggagatgcacttagaaagcatgtgcaagttagagttagtatataaggaaaacatatgaaatgtatgcctaaactatattaaactaatatttttactaatatagtttaatacgttatgagctttgatattcttgggtattagtacatataatacttgaagaaatcgattaataaagtgttgtaaatttgaatctagagtattattataagtatacaaaacaaatttaatttataaaaaataacgaaacgcctaaatgagggtttcataaaatataaaatttaatatgcagaggatgtgatcaagcattgatgatcaatactcacaagattatggcagaaaatattataaaatatgctaatacaaagagtatttatttaattaataataaaagatttatatgggggaacgtgaaacctgattgtgcgcctaaatataaatttaagaagcattattttaatgaaagtataaatatgattattgaaaagattatacatttatcatcattatcattggaagaaatatactatgatatgacaattggtaagtttagtgaagagcttggagtaatatgtcactttttatgtgattttttctgtgcaccacactattatagatgggaatttaagagtacgagcgctgtaaaacatcatatgatgtatgagaaaaatttagctaaggtagctaagtcgtttgatccgacaggaattataaatacacatgtagattcaagtaatatagaagagtttataatgcagctacagaagcaatatgatggaactataaattattataatgatttaaccttttcgtattatgtttgcgatagcgtattaaatatgatattgaacaatgtgtttatcaatgaaaataaggtaattaaagtaatttaatttcttaagataagaaatatttcaaaatggttgaaaaattattttgaaatatttttttgattttgttaaaaggtataaaattttataaagatattatttaatataaacaaaaatcgcaatgttaaaataaaattcttgaacacatgtttaagtattgatattgttattatatagaaaaggttaaaaataaagcggtttaaattaaaaaaagtggtcaaaatataaaaaagtaaaatttcatagcagtgagttttctagagacttctgttgcttatcaagagaaattttaaatttataggcacttttgaataaataatttaattaagcttgacataaaaatatagaaatatggtagaattataaattatagcaattaattaaaatttaacaatgtgaatataattttaaaattgattgttaataaatagactaatcataattactaaaagtctaaatagtagttatataatttaatttgatataaatattatagggtcgaaaaatataaaagtattgaaataggagaaagtagatatggaaaagcataaaaatatatcgatggcagttatcaaaaggttgcctaagtatcatagatatcttgaagaacttatgaaaaatgaggtggatagaatttcttcaaaagaattaggagaaaagattggatttactgcatcacaaattagacaagatttaaattgttttggagattttggacaacaaggttatggatataatgttaaggaactatatacccaaattagcgctatattgggattagacagaggttatgaagctgcactggttggtgctggaaatatagggcaagcagtttcgaattattctagatttgaaaatttaggatttaaaataacagcaatatttgatgcaaatcctaaattaataggaatgaaaatcagagatgtagaaataatggatatagacgaaatggaatccgtactagaagaacataaaatagatattggtataatttgtgttcctagaaaaaatgctcaagttgttgctgatgaattaataagggggggagtaagagcaatttggaattttgcacctgtagatttagtagttccagatcatgtgaaagtagaaaatgtacatctaagtgaaagcttattgactttaatttatttattaaatgagagtgaaggttaaaaatataataaatattgcaatatattatttaaagcttgttcaaaaaataacagattaaatatatatatttgtttttagaaatagatttaagaaaaatttatgcaaaagctttacatgaataaagttttcttctctgtttggcatgaaaatagatatatacctttgatcagttatttttttcatatacttaaaaacttatattaataacgcaatattttattgcaaataatctaggaacgtattataattttaattgaggcgtgaagtcttgatatttttttagacttatttgttatattattaacaattaggataaaaaatataaaaaatagtgtgaaaattaaaaaaataagcaagtttgaaggaggtccttagaatggaattaaaaaatgttattcttgaaaaagaagggcatttagctattgttacaatcaatagaccaaaggcattaaatgcattgaattcagaaacactaaaagatttaaatgttgttttagatgatttagaagcagacaacaatgtgtatgcagttatagttacaggtgctggtgagaaatcttttgttgctggagcagatatttcagaaatgaaagatcttaatgaagaacaaggtaaagaatttggtattttaggaaacaatgtcttcagaagattagaaaaattggataagccagttatcgcagctatatcaggatttgctcttggtggtggatgtgaacttgctatgtcatgtgacataagaatagcttcagttaaagctaaatttggtcaaccagaagcaggacttggaataactccaggatttggtggaactcaaagattagctagaattgtagggccaggaaaagctaaagaattaatttatacttgtgaccttataaatgcagaagaagcttatagaataggtttagttaataaagtagttgaattagaaaaattgatggaagaagcaaaagcaatggctaacaagattgcagctaatgctccaaaagcagttgcatattgtaaagatgctatagacagaggaatgcaagttgatatagatgcagctatattaatagaagcagaagactttggaaagtgctttgcaacagaagatcaaacagaaggaatgactgcgttcttagaaagaagagcagaaaagaattttcaaaata

SEQ ID NO: 101 - DNA, 21369 bp, Clostridium beijerinckii
caaaaacctattgcttgcattctttcaaaattaaatgatcccaataagaaatttgaacggataaacatttttactatatcacttttatttaatttcttttcactcattattttatctcctttctgtaattacattaggtctgaatcatcgatatcatcaatacttccagttccagctactgctactttaccttcattagctattgattttatatggaatattgctgcaataacacctacagcaccaaaaccaattaaattgaagtttgtaaatgctgctaacaagaatccgataaagaagaatggtagtaatgatttactattcatcatattcattaccattgcataaccaacaactactataaatccacctgacacttgaagccctcttgtaataacttgtggtatagctgaaagtgctgcatttacagcatctgtacctgcaagtacacctacgattgcagctggaatagctacacgtattgcttgaagtgataaacctagaatatggcacatttctattcctcttgtattacccttttcagcatatttgtcagctaaatgttggaaaaatactgttattgttcttacgaagatagtaagaacttgtcctgctgctgctattggaaccgcaactgctatacctgctccaattgattgtttaccgattataacaagtattgctgaaattacacttgcaagtgctgcatctggtgccatagctgcaccaacattcatccatcctaatgctaacatttcaagtgttccacctagtataattcctgttttaatatcccctagtacaaggcctactagtgtacatgcaattattggtctgtggaactgtgcctcatcaagtacacttgccataccagtaattgctgcaactattactaataaaattaattgtaaagtgctcatttataattcctctctttctttttttgatttatataaaaaagtttttatatacttatataaattgtaattcctttaatctgtccattaagtttatcttagtatcttttgctagtttccttacctctaattcgatacctttttcattaagctttttaaacgcctcaatatcaatatcattcatgcataatgcatttgtaacctgtttatcaccagccttatagcacattcctccaacgtttacagatttaataggtactccgccttcaaccattcttaatacatctgtagggtttgtaaataaaaataaagttttaaagctgtcaaatttaggattattatatgcttcaattgcctttgctattggaagcacatatgcttttatccctggaggagctacttgaattactaattgttttcttaagtcatccgctgcaacttcatcactgcaggcaaatattctgttacacccactctccttagtccaaactgttgctacttgtccatgtattaatctgtcatctattcttacaaagctaatttccattttttatctcctatcttctaatttttatatttacttaaattgcgcttatattgatataacttgttgcataaattttcaatattattttccaaagaacttatgtattcgtattctcacttaactttgcttattataattatggaactaaaaatgcagttatctgaaatacttatataatttcttcatcttcatctatattgatatttttagttaaaacctttatagcctcttttccagagttttctgctactcttaacaattctgttatgcttgaaaaatctctacttcctagaacctctaaaatcattggcagattgacacctgctacaatttccatattctcatgttgcattgcaattatacttgccgcattaaatggacttcctccaaacaggtctaccataaatagtactccgtctgttgaatctaactcttttataagagtgttatatttttctacaagtgattcaattccttcacctggtttaaatgtaacggcaccaacattttcctgaattccaaaaatcatttctgctgacttaagaatctcttctgaaaatataccgtgggtacctataattactgagatcattactttatcatcctttcttgctacatatattatttttatatttatatacatagcaattcctatgccaactaaggatgtaaataaaaaaatcatcaagaaataaggctataactaccttttctgatacttaactatttttgattacactatgaatttaagatttacatacttcaaatcacatttaacacagtttattaaataattttgtagaattaacacacatatatataaaaattaactgccactaacacacgatccttttagatccatgtattaatggcagttaacttttatatttcgtatttttaagtcataattttttatatattgcgattaagtttgtaaatcctagttttaatagagcactcagcttaatggagttttaagcttaaaattattatcacaacatatatactaatttaaatttaatgttttagttaaattcctacaccaaaacaagcttcatccaattatatcagcaatataataaatttcatcatctgttagatttattgataatgcatttttgaaaatcaaactcgcttccttcaatgcttctatagtttctttatgaaaatttatgttgtcatcatcatatactaatccattattcagtaccattctttctaatgcgcatgcaacatgaaacatgattcgtaatttaactggattttcaaattttaccctcaataacctttcagtaatattcaaaaattcatctaatagggaatagatcttttgtggattaagaaatgttataaattcagcaatagtttgcgtacaaagattttcaaatattatttgcttatctcccgtattttttatagcttctatctttttaccttggataatacttattaatatattctcccctgttccatcgattaattgttctatagatataaagggaattccaagattaggatttgcaatacctataatagccaaaatattattttcttcctgaatcttcttaattgacttagttaagttcttcagaccaagtgaaataatattaacattcttaacacctatattatttgtaacagtctcaactaattccttaagctttatagctgccccttttccagtagaacatacagtaattataaccttatttttttccttagtttcttgaattgtctgcgtgttaatattattagtgtatcccctaaaatcagtaagtaaatacgaatatactgaatttaaatcagcgtcacaaacagaacactttctaacagcttctagaactagtggagttgaaaccatatcaatactttttatgtttatccctgttttttctgtaataacatctgcaaaactatttaaagatcccatatctactaagagtaatacgccttttccctcatcaacttgcttaactttttctataacattctccaaaacatctgatggtgatctttcaagaggcatatcaacagcaagaatattgtcagcttcaaatagctttttggctacactagccatgctagttgcaattcctgccccatgtgatgctactacaatcccaactctttcttgacgagatgattctcgtattgaatttaataataatgctaaatattcaatctcaacattaggtatacttagattaaagttcttctcaatgagtgcatgaatttctttagcaacctcatattctttactttcaattgatatcgataaatcaatattggactcataagaaacagtattcttcttaatcctattaaataatgcactaaaatgaagacttgttgcatagataaaacgttcatttaattttctattcaatctgttttcagctagtatttttatcttttctgaaaattccacaatatttttatcaacaatctttaataggccttccctccggcttatatcattgttgaatcgatcatagaattgttttaaatgaatgctaatatctgtagtaataaatgtctttatttcttcatcattcatgccctcttcttgaagcacagaagttttactctctattattctataaatattaaatggtgtttcataatcatctgtttctaaaaattttctatttccatctggctgaatcgtaatattattaggaatcatattccatatagtcgttttatctttagtttgatttccaaaagctaatattccgctttttatgtttggaggtaatgtacttaaatttatttcaatgtccttatttgtgttaatacaattaaaaaatccctttgcacaaaccaactgcatattagattttagctgtcccacatttccataattagtgctgcctatgagagctttaattgcttccgaagaaatcttaatagttttgttcactctctgtgcttctttagaaagcaaatattgtacaagatccaatttttcattaataggtctttcatcaaaaggtggaatagttattgttatagggattcttctaataaaagtcttaagcagcgtagaatttggatcctctgttgtagctccaattaatagcacatttgctttatgctgtctatctgtttcgcctaatttgttataggttcccgtatccataaagtaaaataccatttcctgcccttctggtggtaatctatgtatctcatctagaaacaatattcctccatcagctttttcaactattccttccttttctttttcagctcccgtaaaagctcctttgacatgtccaaatatatgtgatagaagaagttgaggattattagaatagtcagcacaattaaatattataaatggtggatcctcttgtgactgttttatatttttatagtatttatacatcatattagcaaataaacttttaccaacaccagtactaccaattattagggtatgtaacccatttggtggatataataaagcagcctttgcttgttctatttgatttttcaaacttgtattaaatcctattaacgagtcgaaaggtgatttatcttctttttcctctaacaaattgataaaatcattaatttctataccttcttcacatttatcatttaagtttacatttaatattctaataaactgttctctatcaaaatatagaacaggtctatctttaattttaattattttcttttccctacaaagagtattaagctctctagaagcattgcttcttaatattcccaagtgttcagcaacttgctgcgcactaaatcccttaatttcaaataatttttctttagtaaattccctagaatttgataatatatacttataaattttatcaatttgcttcatggcattatcactttcctttaatccctagttttaatttttagtacttaccattatatatccaaagctataaataacacttatatttaaattttcaactaaatacttacctaatttcttatttaaagcaattattatgccaaacaagagtgtaaataaagcatattatactaaatttacgcttaagcaagcttcacttaataaaaatatttactctttacactcttttttttaatttacacaatacagattttcattaacacactttttctcttattttttagtacaattacattctaatattatttattgtattttttcacactagtatatatattacaattgaccctctaaatttttacctagctgggcactttgcttattagaagtttaaatacaaatttattactgcattatatattaaaataaatttcttacttcacttaaaataggcattgatgctattgctccataatttgtacatgtaatagcacctactttatttgcaaataaaattatgtctttccattcttcaaatcttatattttgtttattttcaatatcagatacttgttttaatacggctccaacaaatgcatctccagcaccagttgaatctacttgcttaatttcaatggatggaattatttcacgctgtccatcaacacttaagtatgtcccttcagatcctagcgtaatagttacaaccttaactcctaattcatgcaatttattaactcctgctattacatctctttctttagttaatagaaataactcttcatcacttagcttagtgaaatcactttttcttatgaactcaacactatcttcaataaacatttctaatttatctggtgttattaatgcatcacgataattgggatcaaaagatacatatatattattcgattttgcatattctaataatttaaaatatgttttctttaattcaccctctaaaaatcctgtagcagaaccaaaatgaaggatatccgagttagttatttttgataagtcaatattattaaatgaatattctccatcactgcctcttagaaaatcaaaattacgctcaccatttgcatctatgccgactagtgctattgttgtcctacctttttctaccgccatttctgtattgatatttaaatcttttaacaattctattaaatgttttccaaagtagtcatcaccaacttgtcctaaaaaataagcatttccatctaatttagagatacatgctgcaacatttgctggcgctccacctgcttttttctcaaacctttctccgtctttcaatcctttattatcaacacaaaccatgtcaattaaaagctctcctatacaaaaaatgtttttactcatcttaatcctccatctatattagtttatctttattaaactatagcaatttgctttgtaaactaatatttgttgaaaattttatacttatctatgtatctaaaagtggctgaattataaagcctaatttagtcgcttttttaaacacatctaaatataatccttaatttaaaacaatactatgcttttcaatacttacttttgcttcacccttagcacaaaacgaaatatctgttgcatctaagttagtataaaaagtagatgtcattacttgttcgccatcatttgcaaatatttcaacagagtatttatctataattaatcttagtttaatctttccattttgatttcttatattcatttctctcttatgtaaggaatcacaaagtttccctgaataacttctatcaaatgaaatgatatcttttcttggatcaaaagtaactaatgtttcatagtcattatttttagcaattttaattacaaactcttcgcaatttgaaccatcaatttccagagtcatatctaattctcttcctgatataccttctaactccacattatctttaattaatacattctcgtatttaacagaattcttatagtaatttctaatttctctaattggattttggattagctttccatcctttattgttagttctctaggaatgctcatcattccgcaccacttaaagtcttttggaacaatattattttcccatgattgcatccatcctatcataattcttcttccatcttctgcttctagagtttgaggagcataaaaatctaaaccaaaatctatagttccataatcttctctattaaacgtatgcttttccttatcatattttccaattaagtacaccgtattatgtccattatggaatttcagtccattcgcctttacttccattggtgaaataatcataatattatttccatcaatcttaaaaaagtctggacattcccacatgcttccaatctcatttttacttctatctagaatacaaacaaagctccattcttttaaatcacttgatttatataaaagaatttgtccgcttccatcagcatgcctgctagctactacagcataaaacccatcagcttctttccatatcttaggatctctgaaatcttctaaattactaccttctggtagagaataacttgttatcacaggattacaatttagcttttcataatttactccatctccaattgcaatacattgagtttgtctaattatatgagccccatcttcttgaactttgtccaacactccagtatacatgagtatttgctttccatctgactctactgcacttcctgaaaaacatcctcccatatcatattcctgatctggcgcaagagctgttggtaactgctcccactttataaagtcctttgtcttactatgcccccaatgcattggtccccatttagtatcgtatggataatattgataaaaaagatgatactcctttgcaaatttagaaaatccatttggatcgttaatccacccgactggtgatgataaatgaaacgatggcctctgttcttttggcatactctttatagattcttcttcaaaaactcttgctttatttaaaatttcactactatttctcactatattattcataatcatttcctttcaatcatcttaaatattatataagcgaccattcaagccgcttatataagttttttattttgcaaagtatgaatctaaatatttttgtttaatttctaatatttttgataaaccttgattatccatttcttttaaataagagtcccattcttcatctattccaccatttaaaatccattcagctttcttacgttctgtatatgcctttactgctgtttcatattgagtaagtttttctatatcttcttgagacataaatacaggtggataattgtaatcagctttcatatctttaacataagttttatgaagtatatctaatctttcttgggcatcatctggagatgttgtatactttccataataactatcaagaactgctaatggtcctgaaacaaattgatttgcacgaacttcccatggtgatgctgcacctaaaggtaaatgctttaaagttttattttctgttaattcaaatacattttgatttttctcatcaccgtatgttccccagttatcttgtgccgattgaagaggttcatataacttatctatccattttgctgttaattccaaatttttatctgctgttgttacaacacatcttcctaagtcaaacccatatccatttgatctaggaacattaacatttccattaggtcctgcaagtgctggtaatggaatataatcttctttatttgctgctacattagctctatcccatgtgaagaacataccataacgatcattctttccttttgcaacaaatgtatcccatttttgtgtaaaggcttcttgatctataagaccttcttcttgaagtttatgaagccacttgataccttctttatatccgtcttgagtagttgaatacacaacttttttatcattcgtaactaaatagtgatctgcgttatctccaaatccgaaagctccaagtaatatagctggatcttggtcaccattgtttataataaatgacataggaattacatcattttttccttcagggtgtttatctttaaatgcttttaaaactgtttctaattcatcagttgtttttggtacctgaagtcctaattcatcaagccactttttgtttatccatggaatatctccaactgcttgtatagcttcttttccacttcctaattcctctatccatgggaatgaataaatatgaccatcaggtgcagtaatcattttcttatactctggtttttcttctagaacttttgataaatttggcatatattttgtgattaaatcttcaactggaataataactccttgttttgaataacgaagtaaatcattattgttcataccagcattaaatactacatctggaagtgtatctttttttgataatgctaaattctttttatcaggaaattgatcatctgtatagcacgtccaatctatatgcacatttgtttctttctctaatctttgaaaaataagtctttcattcgggtcttgagtcgaaattgatggcgcacttgtaagcatttttaaagtagctgtttcttttaatggaaatgaaacatcctttaatgtagctgtatctgttttcttgcttgagctaccacatgctgtaaatgataatactgttaacatagctaaagaaatactaaccaactttctaattttattttttctcatattatttccccatcctttttctatatatatattttttatccctttactgatcctgccattattcctttatcaaaatacttttggaaaaatggatacataactagtaaaggtaaacttgaaacaacaatagtggagtattttagtaattgtgccattttagccattgctgctgcactttgaacatctgcaatcataccaggtcttggtgtattttgaattaagattgatctaattactaattgcagaggttgcaatttagtatcatctaaataaatcatagcatcaaagtaactattccattgagctacaaattgatataaaagtaatactgcaataattggtttacataccggaatcattattttaaagaaatgtgtaatatcacttgcgccatctatagcagatgcttctcttaactcttttggtaagctttgaaaataagttcttgccaatataatattccatacattaattgcgcctggaagtaaaatcgcccacactgtgttaagaagctttagattgtcaaccaaaagatatgttggcatcaaccctccgccaaaaaacatagtaataatatataaagtagtaataaattttttccctacaaaatctggtctagataatgggtatgcagctaaaagtgtggctccaactgaaattaccgcataagcagtagaatagaatacggaattcaaaaatcctcttaaaagcatatcgtctttaaatactcttgtatatccttctattgaccatttactaaaatcaaatgttattccttgattgtttaatgtattgggatccataaaagaagcaacaactatatatataagtggtataataatagctaatacaaaaagtattactcctacataaccacttattacaatacatttatcagaaaatgataattttttgaattttttcattttcatattcatcttatattccttctccctcgtttaattttttaacaattgaattcacaactattaataaaactatattaataactgaattaaacaaacctacggctgttgaaaaactataatctccatttagaagacccattttataaacataagttggtaaaatttctgaagttggtaaattcaaatctgtttgcaaagctaatgctttttcaaaacctacgctcataatatttcctgctgataaaataaattgaataaccataattggtttaattgctggtaaatcaacattcaaaatttgttgaaaaatattcgctccatctataacagctgcttctgttaattcttgacttgcatttgaaagagctgctgtataaataattgatgcccaaccagttgcctgccaaactgaactagctacatatatagtccgaaatgcactaggcattgccataaagtttgtagcagttccaaaaaattgattaactggcccaatcggtgataagaaaacgataatcatacctgaaattactattacagaaataaaattaggagcatacaaaattaattgaatctttttcttaattccctcactctttattcttgctaaaagtaaagcaagtataatcggtaacgggaatccccacaatattccatataaacttacctttaaagtattcattaacaaagtcataaaatctggggaagataaaaatctttcaaaatgttttaatcctacccactgactatggaaaactcccgaaatagcactataatcttcaaatgcaattagtactcctcccataggaatatacttaaaaataattaacagtattagtggcggtagcgtgaagaacagatataattgataattctttttgatatactttaacttactatgtattttagagttctttttattaataataggatttccaccatctaatctgttaaaattaaatcttgtactttttaccccattcaaacttatttctcctttcattttattatttattttttacatttgtaacaaaagctcaatttacctttacagatccactctgtttgccaaatcttttttgtaaaccttatctttaatttataaatagatattaccagattcttattacatttgtcaatataaatattacattttatcatcgttgcatttttacatttgcacacaaaatatattatatctctttttatttgctagtatttatgtatatataattattttattttacatttgtcacttcatttgttatactaatgtcaataacaatacttaaaatattgatatagattttatatgacaaagaaaggagcctttaataatgctaaataagaaaataacggttcaagatatagccgatgaattggggatttcaaggaatacagtttctaaagctttaaataatactggaacattagcagaaactacaaaatctaaaattattcaaaaggcaattgaaatgggttacaaacaatttgcatatgtaaacaatgtatcatccatttcccccaattcatctttaaataaagaaattgcactattaacaagcagtatgccaaacagttcccattttggatctcatcttttatcaggttttgaagaaaagatgagcactcttggctatagattatctatgtatgttgttcgtgataatgaattaaattcctcaagcttaccatcgaactttaaacctgagttggttgatggcataatatgcatagaaatgtttgataaaaattatagtgagcttatatgtggattagacattcctacactatttatcgattcacctagcacccacaacagtaaacctgtaaatgctgatattcttttaatggaaaatttccatagtacttataatattattaaaaccctaattaataataataaaacaaatatagggtttgtaggagatatatatcattgtgagagtttttacgaacgttggaagggttattgctctgctatattagattcaaaactctcatttgatattaataattctattatcgaaaatgacaaagaaccttatgatgatcctgaatggcttggaaacaagataatggacctttcggttcttcctcaagttcttgtatgcgcaaacgattttattgcaattaatgtcataagagctctaaaacataaaagtatttctgtacctgatgatattttaatatgtggatttgatgattcaatggaatcaaaaataattgaacctcatctcactaccgttagtattccaagttatgaaatgggagatattgccgcagatttgttactttcaagaatagataatccatctattccatttagaacaatccatgttcgtacttcacctaagtttagggaatctactggaaacttactgaatacaattaactattgaccaattaaaaataccctataaagataaacaatttgataaaagtctatctttatagggcactttgtatgtgtaataaaatacatagcatgtcaatttaacattctctttaaataatccctaaaagtaatatttcaataactaattagcccctagcacccaaggctcctgaatagtggtctttaaattattataagcattaatgagtgttcttagtgatgaatctaactgctcactttttagaactaaagcattataattgttttctgtcatcagtcctacctctacttgtgtctttgcatatttaagttttgtgttagttgactttattgtatcatttaagtcatttattttattttccaagtcaagcaacgttgaataagcttgccttaatccatttttcagactcttttttgaatcatcaagcttaacttgtgcttcctccactccatacttaccatctacatatgctccatacttagtaagatccagataatacttcaatgcatttttttcataatttataagttgaagagcataagaactaagtccaatagaataagcaccctcgtctaattcaactgctcctgtagcatcatcctttttcatatatgaagctggagatggaattccaccagatggcatgcttggaatatctttgttcataatatcctttacgccatcatcctttaagtcatctaaataatcctttgtaagattaattaatttctgattatattttaaataagtttcaattttatcatttatatattcatcacttgaaccatcaattttaaataaattatattctatattgggatctaaagtataatttgataaattcaaattagttaaaactcctaaataatccatgctgtcatttaatgaattttcttttgcagttatatcattttttaaagaattaatttcaatctgcttatccgttaattgatttgatgttgccatgcctatttgcacttttgttttaatagtttctaagtctttattttttatatctaaatttgtcttagcttgacttatatctatttgctttataataattgcattatacttattagtgatgtcgctagatatttgatcttgcaaaaaatctttcgactgatttgtttgtttttctagaagctcaagcttatcatatggaaaatcatatattttttctccaagactctcataaaagtcattagttttatcctgaatatcttctttctttctgtacatagatatttgctgagactttaaatttaaatcttcactattagttatagctgcatttataacctgatctaaagtaagaactggtttaccattaaatgattgtccatttattattgagtcactttcatcatttattatttgagcacttactacttcattatttttttgattctctattgctaagactggatttatacttccacttactatacttaatccaattccaatggcaaccatcctttttatattcttcttcatttattcttcccccttgtattaaatatctatataagtttctatcgatattttttcttcttcttcctttgatatcttcctatttccatatttactcagtgcaattctagcaaaatataatacaattcctattaaaaaccattctactgcatacattattccactttttatatatggtaatataacatcccatccaactgcttttaagtttatgaattttaatggaagtgctacattcataaatggccaaatatttttaattattctaggaagtccgctaggcattgcatactctgggaatggaattccactagctaaaaaggttactatatttatcatggtaaaaaattgagtaaaatatattaaattattaaataacgctgcaaataaaactccaatagctgtaagatcaataagaaatattgaagtcaacgtcaagtattctaagatatttccacgaagaggcagatcaaagtattttcctaaaatgcataaggcaattaagctcgaaattactgatatgaaaataatcattaaaactcttgctaaaagaataagtatgtttttcacagtatcttttgatttaaaattgattaaagttaacttttctctactttttattaaagcaggtactaaaaatgtcacaagaaaagtaccttgcagtaaatatggcacaagagagtacatcaaataccgtatatagctaagctgtggttcataaagaacacgctcactatatgaaaaagtcgtaacagctttctttgcattatatggcatcatatttttgccttcaaatactttaagttgaattccagcatttatagttcctgtgactccattacaatatgcatataaattacttccaacaacaacgtttgtttcatctattaataatgcaatactaggagatttctttttgacaacatctttattaaaatttttaggaatcaccattcccccactaacctttttctccttaattgcctgttgcaattcttcttgtgaatctgcataataactaatattcacacctggactctttttaagttcttctattatagttctggataaagatgagttatccatatctactattccgaaaggaatattttcaatatagactttactgaaaatacaagccacaaaaattactatactaatgtgaagtaaactaagtgaaataatactttttttatctctagctagaaacttcagaaacctcatcttttttcctccttctaataactttatttaaaattttctctttaatattagttcttttctttaaaatacttttaattagcagtataactaacataataatccatgtaaaaatcatatattttatcaaataatatagattaggcactatatcattaaaatttaatcccaaaagagataagtctctcattggaattccataatataagaaaggaatgattttagataattttttaaacacctcaggtgcagccattagtggaaatgtataccctgacagtaaaacaaaagatgaagccataaggctagagctactcactgcttctagtttattttttataattaatctaaataaaatccctaaatttatcatagtaatactaaaagttatagttaatgcaattgcagctttaactgatcctctataaggcatttgaaaatatttatattgtataaacatcaatagaaaaattgatattgaccctattaatccaaaaatgatacttttaattaacaagaaaaaatagttctccttctcctttactactaatgcaccaagtgaaataattcctatctgggcaattccaattaacattccttgaagcaaaaaattagctgtgcttcttgctgaattccctaaaaatatagaatcggtttgtattggaataatattatttttaatttcctgaggcattatcccaagtttaccttccccaaccttcattaaataactaaccttaatagtacctaaaatttcagctattctagtcttacctgcacttactgctgacatctgggagccatcatagcaaatcataattttaggtgcttttccatcgtttaagtctttagaaaaatttacaggaatgataataccaaccacgactttcccttcatccattaaatttttaatatcattatcattctcactataattaactacattaaatacttcattcgtatttatttgagtaataaagtttttactcaaagtagaatcatcatgatcaactatcattgtaggaacattttctactacatgttcactatatgtataacccaaagcataactagaaatagctggtattatcaaaagtaacataacagaaactataatttctttagactttataaatctttctttaagcttcgatactatttccttcatacctattctcacatcactttccaaaatcaacaaaagcagtcattccagaacggagtggcttatcgttatcagtcaattcaactttaacgccataagatagtacatcaaattcaccattatcatttgttgctcttttaactgcaaaatcagcatctttattaattctaactactttccccttaaattcctcgtccttatatgctggaatctttacagaaacttcttgttctaagtctactttagataaatctgtttctctaacattacataatattgatggttcatcagttttagtaactacaataagctgcattcctgttgatataacttctcctgcttcaacattgacttgtgttattgtcccatcttctggtgcggtaactgtagcataattaagatttacattaactccttgaagtgctgcttctgcctgttttatttggccttcaactgcttcaactgatgcatttgcctgctccacttgtgcctgagccgcctttatatcttctggtcttgcaccactttgtgctatatcatacttatcttttgctacctgcatttgagtttcagcattatcaaaatctgatttaggaattgaaccttgatcatacaaaacttttaatctatctacagttaccttggcaagatcataagcagacttagcttggtcaatttcttctggtcttgcaccattttgagctaactcaagctttgcacttgcagcatccctagctgcctgagcagcatttaactgagactttgctgtttcaatttgagcttgcacttgagcttgttgagctgccaatgtatcactatcaactataagcaaaacatctcctttttttacattatcaccttccttaactttgatttctttaacctttccgggaattagtgtatttacattaacatctgtcatgtcaacatttgactgcactattaaattactctgagcttgctttactagcttgtctccagttaatgtagatactggcgtgcatcctgtaaatatgttagctgcaaccattgaaaatactactaatgctacattttttactttcataaaattcctcctaaaatataatctagaaaactttattttctaaaatttaaacctcataagttgtatatttattgttgacttaattaggattaatacatatattgacattatattttttatgaattatcctttatatagacacatgtctattatagaaatatgtggattcttattcaataatcaatattaatggataagtctgttaataaactaaaatgataaatttgtctattaaatgggggattacaaatgacagataggcgtaaaagaaaaacacaacaagctgttcaaactgcttttgctaaattaatatcaaataaagatataaaagatattactataaaagaattatgtgaagaagcagacattaataaaagtacattttatttacattacagagatatttatgactgtgcagatagttttatgaattatgccgtcgataaaaccattaaagttatagaaccttatgattttaccgagttaataaatcacatgccagaaataattgaaaaaacattagatatatttagggaaaatagggatctttatgttccatttttcaattcaccaaggcactctttttctatgtataagacgaaacaacttataataaaaaagcttttagaaaaaactcaaaatgatgagaaatcaagacttgtaaataagagtagcatctcctttattgtatgtggactttttggtgttcttgaacaaatagaatttgatgaaataactcctgaaataacttcagtgctaacatctaaaattcaaaatggatttattccttctaaagatactcactaatttaacgcagcatgttagtaaaccctaatgaactaaaataaatgagcaactgaaattaaattacaataaaaaaacagcctaaaacacactatattatgctttaggctgtttcctcgctatccatattcagtatttatagcaggctcttttatcttcatattcgtgtccattataagtttgctatttttgcaattcacaatgcacatttcataattaatgctaaatttttgaaatatatttagaattataatgaagaattattcttgcaatatattaaaaaaaatcctcttttatcttcaattctgtaaataaaacattataaccactatcaatagggctacagcaatatatcccacatttaacatttttcttttgactgtgtagatgacaaattctaagttgtctccaacctttatttagaacattaacctctattttatagtcgtttccttgtctgctaattctaaattcagcttcatcaacttgtttatctaactcttgtgtagaccaatctgaatatcccaaattagttacgacagcaccaagttttggaggattatctaattcatattctatagaagtcttcagccaattatcctcatccactcttactgctaatccgcactggtcaaattgattgattggattaaacttaacctttgttgtcatagtaaagtccttttcgatttctatataaaacatatgagcattatcatttctaaagccataatgagtcctttgccaaaaatcagttaccttatcagtttccacgtaaattcccttttcttccactttccacactttaggctcatatagccacttcatcttatctactgacgaagaatcatttactaagtcaataaaaacctctgaatctttttctaatattttatcattttttattattatatctgccttcgccttagggttatctattgaaaaatgctgtctttgaagccacataaaataatctccataaagatcttttttatcttcatcacttctttctatggacgatgtaaaagtacaatccaaccatactcttatatcaaaattaatatctacagtattcttaaatattaatgctccctcaactataactatatcattgcttttacatgcattttcaatttcattttttattgaagaaaaatcataagcattttcatagtaatacttagatggattaatattactaagagattcttttaatacatcttgattctcctctaaagaaattgtataaacattatattggccttggtatctttcttttaatttattagcgaaagtagtttttccacttaaacttataccgctaataccaattaacgccctcgaattttctttcactttttcatttattaaagaatataatttttccataattaatacatcaactcccttagtaatatttcttattatattttagcatatgaaatataataatagattaaatatgtccttcatatttcgtgccagacaaatatgcaaattctgcttatagccgatttactagaagaatttactgtctcagcatgatgcaaaatatgcaagcatactagtctagtattttttagttgtaccttaatgtagctttataataactaattatactacataattattttcagaagtcctcctaaaataatcctcacataaatcaattgatttatttaacttgacaaaataaggaattaatattataaatatatatataataaatgtacttataataaatatatatatattaaaggagaggttaaaatggagttaacattcaaattagaagtaaatgcacctaaggaagctatttggtcttattatgctgatcttgaaaaaagacatatttgggaagaagatttagaaagcattaaatttgatggagaattacaaacaggaactactggtacaatgaaactagagggaatgccagagatgtcttttactcttactaatatcgttcctaattgttcttattgggacagaactgatgtccctggggttggaggcatatattttggacatgacatattgcaaaaagatggtaaaacctttattcaacatactgtgagattagataaagaaaacccatcagaagatgatttaaattttctttgcaatgtattttctgatgttcctaaatctactatgataatcaaaaagaccagctaataatagtcaagttaattttcaaaaaaatagtttttggaaaaagagtatggcaaacaaaccgttttaaaacacgaacggttacagaaattggaataaaattaagcgactttgt

SEQ ID NO: 102 - DNA, 21245 bp, Clostridium beijerinckii
tctgaaaataattttttactcattcttttcacaaccttactatatttcttcttatcttttattgtacaaaaaaagaacctattgaaatagtctttttttagtgtctatttcataggttccattttaattcggagtaccagcctttttttttgggcgtaggtgcgtacaacaaagaagaatataacaacttcattaatgcaacgatcctaccaatggccaagggtatcgaacaagagttaacaaggaaacttttatatagtccagatctatattttaaattcaatgcgcggagtctttattcatacgatatgagcgaactggcagcggttggcggtgatatgtatgttagaggtttaatgcttggaaatgaggttagagattggctaggaatgtcaccattagaaggacttgacgaaagagtgatccttgaaaactatattccagctggaatgataggggatcaaaagaaattgcaaggaggtgatgaataattgagtagaattgaaagacaaacaaggagcatgagcatagcgcttgaaaccagagataacgctgatagtaatgaaatgtatattgaaggttatttcattgtttttaatcagccaacagagttatggctgggagcatatgaagaaatagcaccaaccgcacttaataacactttatcaaatgatataagagctttgataaaccatgatacgcgccttgtattgggccgaaacaagtcaggtactttggaattaaaagtagattcgaggggcctatggggaaggatcaggattaatccaaacgattctgaagcggtcaatgtgtatgagcgtgtgaagcgtggtgatgtaagtcaatgtagttttggttttaatatcatatctgaagaaacagagtggcgggatgatgggagcgtcaaatggaccattactgaagtggatctccacgaagttagcgttgttacgtttccagcctatgaagaaacaggggtacaagctaggcacaaaagcgttgaagcttatagagaaaagcagattttacaaaagaaaaataatttaaaagtgaggttaaaaaattatggcattaaagaagctaataacagctaaaaagatagaacaaaggaaagctagtctagctgaattgcagcaaagagaagcagaattaaacacaaggaccgcagagcttgaagcagcagttgaagaagccaaaacggatgaagatattgcattagttgaagaaaatatatctcaattagatgcagataaagcaagtcttgaaggcgaaaaaacgactttagaaactgaaattgcagatcttgaaggggagcttgaaaaattaaattcaaaagatccagtaaatgaaccagcaccagcagcagatccaacaccagcaccagaagcaattgaaagaaataaaaacctagggggagaacaaaggatggcatcaaacaaatttactaaaagaggacaagtaatagaaaggttaaacagagaagaagtaagaagtttctattctaatttaaagcaagcaatagaacaaagaagcataactggccttgatcttacaataccacaaatattattagatacaattacagacgatcttggaagatattcagtattatatgatcttgttagagttgcaaaattaactggaaagggtagagcaataatagctggtgaagcacctgaagcagtatggacagaaatggtcggaaagattaatgaattaagctgccttttcacagatgttgaggttgatggttataaaataggaggattcattccgcttgataactcatacatagaggattctatgattaatttagcttcacacgttgaggattgcttaaaagaatcaattgcaatcgcacttgataaagctatattatatggtactggaactaaaatgccaatgggtattatcccagcgataaacgcaaacgcaggtattaaagcaactaatattattacattaacaactacaaatacaaaatttgaaaaaataattgaagctatgaagaacataaaaagaggtagaaggggcagaggtccgataacaatagttatgaatgaatcaacatggctaggaacaattgtaccaatgtcattggctagtaatgcggctggggcatttgtaacagtaagcaaccaagccttcccaggtgtagggtacaaagttgtatttagtgaagaaatggcagacgataacattttagttggagattttacaaagtatcttttagcagaaagatcggacataaaaggggcaagttcaacagaatttttattcacagacgataagacagtatttaaagctactggcagatatgatggtaagccagtaagggaatccgctttcgttttaattggtttaggtgggacagctccaacgctttcagcatcattcaagccagatgaagccaacaaagttgttacaccatagtaattgaaatttaaggaggtgtaatggatgaatattgaattgatcctccaattggtaaaagaagaattgggcatcaagtctggtattagagataattatattactgcaattataaaaggaataacaaaagagttagaagatgaaaaaggtttgattttagaatatgagaacttttatcatcttttatttattgttgattatgttgcttggtcctacaggaataaggatcacgcagctatgccaaggcatttgcaatatagattacacaatttaattattcatgttggaaggggttagatcatggcgtatgattacgaactaactttgattaagcatacttttaaaaaagatgaattaatgaattaaattcctgaagaaataaaaacggatctatattgtgatttaaaaagcataggaagaaatgaatattataatgcagcaagccagggcctaaagccagagataatatttgtaattcataaatatgaatacaatggagaaagagaagttttgtttgaagaaaatagatataaagtgattcgtacttattcagcagattttgaagaaatagagctaacgtgtgaaaaggtggtttaaatgtctaagatagaaggattggccaaagaaattgcagcagccttagcagcatattcaagcgaagtaactgaagggttagaagtagccaagcagcaagccgcaaataatacagcaaagatcctgaaaattacaagtcccaaaaatacaggagcttatgcaaaagggtggacagtttcaaaagaaggcacgagattaattgttcataatagaacaaattatcaattaacccatctactagaaaaaggccatgccaaagtaaatgggggtagagttgcggcaaaggtacatataaaaccagccgaagatcaagcaattgaagaatatataagcggagtggaaagggtgatccgtaaatgataataactgaattaatagagatattacaagaaactggctacccagttttttattcacatttcaatgtcacagatgataacccagcgccagaaccgccatttatgacatacatttatggcccttcagctcatatgtatgcagataataaagtctataaagagatatataacattcaaattgaattatatacaaagatcaaagatcttcaggcagaaaaaaagcttgaagatctttttaattctaatgaaattccttattcatctgaaggtgaggttttcattgaaacagagaacatttatcaaaaaatatacgaagtgaggttaacataatatggataataaagttacttatggattaacaaatgtgcattacgcaactttttcggttgttaatggcgttataacttatgatacaccgattgcactagaaggtggaattgaattggccctagatcctagaggggatatgaccgaattttatgcggataatgttttatactattctgcatcaaataaccaggggtacgatgggaccttgacccttgcaaatattccagagcaatttttaattgatgcgcttggggaagttaaagacgaaaaagatgcagttttaacagaaagatcaaatttagtgggcaagccttttgcgctattatttgagtttgatggtgatgtaaaggcaacaagacacgttctatataattgtactgcatcaagaccaaaagttggatctagtacaaaggcagataaagcagatccaaacacaagtgagttaacttttgttgcagctccaagagcaacagatcttgcggttaaaacaaagacaactacaatgacaccagcagagatctataatggctggtattcaaaagtatatgaaaaagtagcagcttaaaggggtggcgtaattggaaaagacaataacaattgataataaagaagtcacttttaaatcaacagcagcaacaccgcttagatttaaagcgcaattccataaagattattttgcagaaataatcaaattgaatagattaaataagtttaaagatgcgaaagacaattttgaaatgttagaaaatgcagattttgaaatattttataacattatatgggtgttagcaaagaccgctgataattcaattccagatcctatcacctggctggatggttttgacgaatttccattatttcaaataatcccagagattcaagatttgattgcttcaagtattcaaagtaaaaaaaaatagaaaatgataattcagcagatgattcggttttaacgactgaatcatttgttattttatgcagaaaatgcgatctccagcgtgaagatcttgaaattatgaccattggtatgtgctttgattacattgaagaatttattgaaatgaacaacccaaacagaagtaaaacaagagcagcaaaccaggccgactttgataatttttagaaagtgaggtgagaagatggcagatagtagaattaaaggaattactattgaattggatggggaaaccacaggactccaaaagtcattgtcagatgttacaaagcaaagtattgatattcaaaaagagctgaaagatgttgaaaggctattaaaattcgatccaggaaacacagcagcattggcccaaaagcaagaattattggccaaacaaatagaaaacacaagccaaaagttgaaagctttgaaagaagctgaaagccaagtcgaagcgcaatttgctaaaggggatataggcgaagcacaatacagagcattccaaagagaaatagagttcacagaaacgtcattaaataagtttaaagcatcttacaaggatgctatgaacccgccttcaggtggtgatttaaaaaagcctatcaaggatctggaagaagaagttgaaaaaagcaaaggtttattcgctaacatgggtgaatatatcaagcgcggttttggaatggccattggtggggatatatgggacaagctaaaagaaggtataagcggagtcataacatttggtggagattggcaaaagtctttaaatggattgcaagctcaaacaggcgcaaccaatgaagaaatggcaaagtttaatgaccagatcgaagcggtttataataataattttggcgaaagcattgaagatgccgctgaaagtttttcaagcgtaagacagtatatgcaaggcacaggagaggatctgcaaggggtaacacaaaatgccattgcatttagagatacctttggggtggaagtccctgaaagtatgcgttcagttcaggcgctaatgaaacaatttgggatcacatctgaagaagcttttaatttattagcacaagggcagcaagagaatttaaactatagtgatgaattgttagatagtgtaaatgaatattcggtccaatttggaaagcttggtttagatgctaacgatatgcttgatgtttttgaagctggagcgcaaaatggggcctttaatttagacaaagtaggggatgcagtaaaagaattatcaatcagggttattgatggatctgataccacagcagatggattcagtaaacttggccttaatgcagatgaaatggccaaaaaatttggtgcgggtggagaaactgcaagagcagcctttttccagatcattgaaggtcttaggaaaatggatgatccagtaaaacaaagtgccgctggggttgatctttttggaactcaatgggaagatctaggcccaaaagtaattacaaaccttgatagtatgcagaccatgtttgataagacaaccgattcaatgaatcaaattaaccaagttaaatataatacacctatcgaagcgctgcaaggattaggcagacagattgaaacaagcatactattgcctatatcaaaggagcttatgccaagcttgaatgatgcagcagatcaaatggcagacgctttttccgagtccaatctaaaagctgggatagaagcattgtcacaaggattgggggaattaataaaaaacatagctgatatggccacaaatgcgctgccaacattgttggatggtctgggttggataatggataattctagtttaatagccgctggaatcgttgggataggaacagctatgcaagttttcgcagcaacgagcgtcattaatgatctggtgctgggattccagagcgcaaaagaagctgaagaagctttgacagttactcaatatcttttaaataccgccatggaagcaaatgttataggtttaatagttgcggcaatagttggattagttgcagctatagtttacttgtggaatacaaatgaaggttttagaaatgcaataattggagcatgggaggcaataagcaccaccgcaatttctgtatttaatggaataataactttctttacagacacaattccaaccgcttttagtggatttgctttgttttttacaactacagtaccgcaaacctttcaggatggatggaccaaagtaactgactttttcacaaaaagtataccagcttggttagattccatggggcaatggttcgcccaattgccacataagatagcttttggattaggtgaagcggtaggagccatatttaaatggggatcagatgtaattaattatttaactataaatgtacctcaatggatcgattcagttggtcaatggtttagcgcactacctggaaatataatgacctggttaactaatacaattactaatattgaatcatggggaagtaatatgctaagcgaagcgacagcagccgcaagcaatacatataattctgttattaattggttcactcaattacctggcagcgttgaaaattggttaactaatacagttgctaacgttactacatggggaagtaatatgcttacagaagctacccaaggggcacaagatacttttaatggaatcgttgatacctttgaaaacttaccagaaagaatgcttgacattggtaaaaatatagttgatggccttagaaatggaattaaaaccgcctgggatgatatgagcggatggatgggcggccttgtggatgattttgtggcgggtataaaacattcattagatattcattcaccatcaagggttatgaaacaaatagggatatatactggccaagggtttgagattggtattgcatcaacagttgggaacattgctaaacaagcaaaggccctagcagcagcgatcccagcagttgattcaggaaatgcgaattttgcaatatcaggcagccgccaagtagccagcagcggaattagtcaaattgtaaatatctatagtccatcagcattaagtccagctgaaaccgcaaagcagaacaaaagagcgttgcaagaactagcatttggattgtaaggaggaaaagaagtgaaaaaattaacttatgttaacaaattaggccaaagaattgattttaatgagttcgcaccgcttttgctgcttggtttttcagaaaaagggaaagtaaatatttatactaataaaggcatgaatcaggatggatcaacttacttaggcaatacgattgaatcaaatgacaagacaattgaaattgcaataattgctgataatgaaacggatctaatagattatagaaataagatcaataaagtatttaacccgcgactaggtgaaggatatttgatctataaagatccagtaaaagaagttaaaactaaatgtataattgattcacttccatactttacaagtgttaatggcacagttaataaatgtcttataagttgtaccgcaagcaaccctttctggatgaatatagcagaatcacaagctgaaattgccttatggaaaggtgatttcggttttgattttgaaataccagaggaaacaggcgttgaaatagggcacagagagccatcattgatcgttgatgtatttaatgatggtgatgttgattgtggtattagggccgaatttagagcgctggcaacggttgtaaacccatcaatattgaatgttaatacacaagaatttataaagatcaataggaccatgcaagcaggtgaagttattgttttaaatactagcttcggcaacaaaaagcttgaaagcgttataggtggagtttctacaaacatatttaattatattgattttcaaagtacatttttacaattggctacaggtgataatttattcaggtatgatgcagaacaattcattgataacctggaagttacaatatattacacaccacaatatttgggggtgtaagtatggagttgcttatatttgataggaatttaacctttaaaggcatagttgaaggttttatatcatttagatatgttagaaagtattttgaagctggagagtttgagctgcattgtggcctaactcctgaaattctttcgttattgaaaagggaaaatattatatatatcaaaggagatccagaagccgcgtacattgaatatgtgaatttaaaacaagatgaagaaggcaaagagatcattattgcaaagggttattttttgactggctatttaaataggcgaattatttggggtactgaaataataaacgatacaacagaaaatgccatgcggcagctagtagaccacaattgtataaacccaatggatctatcaagaataataaataatttaacacttggcagcttaaagggattcaatgaatcggtcaattatcaagtatcatattcaaacttggctgaagaaattaagaacctaagtaatatatctgatttaggccataggatcaagtttgatccagttaataaagatttgatctttgaagtatacaagggccaagatcgaagcataagccagaatgtaaacccaaggatcatattcagcaaagaatttgaaaatgtgctaagtcaagaatttacagatagtttgaataactataaaaatttggttctaattggcgggatcggtgaaggtcctgaaaggaaacttgccaccgttggaaattcagcgggcctggatagatttgaaatatttgcagatcaaaagagcttaaccaatgttgataaagataataatgttttgagcgaacaagcttaccatgatttattgatcgaaaagggaaatgaagcgcttgcagcaacaaaagaagttctgacttttgatagcactattaatgttaattcaaatttagcatataaaaaagattttaaccttggcgatattgttacgtgtgtttctaaaaggtggaatttagttataaacgcaaggatcacagaagttgaagaagtatatgaacaaaatggacaaactattaatataatttttggtaataatgtaccaactttaattgataaactaaagcagaaaatgaggggataagatggcagaaaagagtggattttttaacagtattaacggagatcgtaagtataaagcagactttttcgcggaatatttttcaagttttataggcaatggagttttcccaaaccctagtacaaacttacaaacattatcgaatggtgatatgaccataaccataaagcctggtaaagcatggatcaaaggctattactataataatgatgatgatttagccttaaatattgagaatgcggatggaatactaaatagaattgatagagttgttttaagatttgatgttataactagagctatcaatgcaaaagtgaaaaaaggtacttttgctactacgccagcagctccagagctacagagagatgcgaacgcctatgaattgggaatagctgatatttatattggtaaaggggttttaagtataagccaacccaatataacagatcttagacttgataattcaaaatgtgggatagtccatggaactatagaccaagtagacacgacaacattattcaatcaatatcaaacctggttaactcaaaagaaaagccaatatgatacagacctttctacttggacaactcaaaagaaaacagattttcaagcttggtatgattctactaaaacaacagaacaatcacaaatagatgctatggaaactcaatttgcaaatgattttaactcatggttttcaggaataaaaaatactttaaatggcgatatcgctggaaacttaacaaatagggttgatggtatacaagtcttacagttggcccagggatcttcaaacgcaataatattaaatggtgtggatcttattgatggaagttcaaaaagcttcagagttgcttataataacaatggtacaagcacacttgttaatggaaggccgctatataaaccaaacacaacaacaccagccaatttgataaagggtaaggcggttacaatttggtacgatctggcgggtgattgtttttttatcaaggctagtgccgaagggaacaccattgcagctcatgtactagcgaatgaaacttttagcaatgataatgatacaggcattgttggaactatgctaaatcagccagcttcagtaagtgcggtaagtgttggagttagtgcgttctaccctaacaatagatacttcagatttccacaaggggcgtatataacaagcacaacaagcggctacccagaaatagttgccacagccgctcaaattgattcaaatatcgtttcaaataatataaaatctggtgttaaaatcgtgggcgtttcaggaagtccaaccgttatcgacagcgcagatgcaaccgcagcagcaaaccatattttaaatggatatagtgcctatactaaaggggtaaaagtggcggggaatatcccttccaaagctgccgcaacaataacaccaggaacaacggatcagacgataccagccaatacatatacagctggcccgcaaataatcaaaggtgatccaaacttattaagccaatatattgtagctggaaaaagcatttttggggttgatggatctgcaacagttgaaagtttgggcggatcttatacatctttttatagatcaacaacaagttatcaatatgcaaccccttgtgttgcaatagacaatgatggttgtccatatttattggtttgcaatactaactatggcacagttgatttaataaaatttgatgctaaattaaatgtagtaacaaaagtgtcatggcctaggccatcagacacaagcgcaccatttataaggtttgatagatggacaaatttattatgggtaaatatcgcctatggtggaggggctaattcaggttggtatgatactaatttacaatttgtaggctggacatacagatcaaataggtgcttggcccattctccaacaagttatagttacgtgcttgatgatagcaacggagacatctacaaagtatcaaggtacagccgcgatgccaatatacagaggtttgatataaacggaaatttagtttattcttcaacgatctcaagtgttttccaatccacgacagggggaagtcttattacttcaataggactatctaaaaactgtatttggatagtagacagtttcaacaacggtactacatcttatacaaaagccaataaatcagatggatcgaatgttgctaaagtcagtcttagctcgatctatcaagttggttttgtaggaaatggaactactgattatgtatttaagccatttaggtcaagtacaagttcttcaagttcatacggtggttatatattgaaggaatctggggcgcaaatgtcaataggttacgcatacaacgcaggattcagcccagcggggcgatcagtgatagtgttagggacaagtgaaggaagtggatcaagcgcaactggaactggcgttactgtattggatggtgatgttacctcaattccacaatcatatccatttggcggtctatacaatgaaggtagcggatttgttggggccgctggtaatgcaaataatgaatttgtaatgcttgcaaacgcaagaaatatattaaaatttaaagtttaggaggatataaaatgatatttattagaactaacgaaaaaaatgaggttacatttattagataaaattttaattatgatcttaatgaatttgatgtaaatgaaggctatgtattagataaaaatgagcctgaaattgttgaggtcgaggggaaacaatcaatactggtatatgataaagagcataatgaactatactacaaatatattgatatagcaaaagaagttgatccagttgaagcaagattaaacgaacttgaagccgcacttgtagagattgcagcaatgttaggaggtgcaaaataatggttgttatatatgttagaagaataaaagaggggataatgacaatcgaagaagtgccgccattatggagagatagagtagcggcgattttagcagctcaataataaatgtcatggcctaaataacagacttttgataagtcttttttttatggccttttttaatgttgaatgagtaggtgtgttatggatgaattaattaatatggccttaaaacagggcctggggtatggaatgtttgcgtgtttactggtttatgtattaaggaccacaggcgaaagagaagcgaggtatcaaaatttattagatactttggcagaaaaatttaatttagttgaacatattcaggaagatgtaagagagatcaaaagcaaaataaatgaaaagaggtagaaatgatatgaataaaattgatttaaaggcaagattaaaaaataagagtttttgggtgtatattgcaagtgcaattgtacttttaagccaacaattaggatttaaaatattccctgataattggaatgatatagtaaacacagtgcttggagttctaacaatgttaggaatcgttgtggacaatagcacaacaggaatgagcgatagtgtaacaaaggaggaattgcaataatgaaaataggattaaggggcgggcatagctccaattgtattggggcagttgggatcgttaatgaatacgaacaaatgcagcaatatttcaaatatgttagggatctattaatacaatatggccatactgttatagattgtaatagcaatggcagcaacgcaaatgctgaattatctgaaggagcagccgcagcaaatgccgctaatgtggatctatttgtaagccttcatatgaatgcttttgatggatcaggccatggggttgaagcgcttgtttcatcagaatcaagcaaggcccttccatatgcccaaaggttatgtaataactttggatcgttgggattcactaacaggggtgtaaaatatgtaaaagattatgaaatgaaccatattgcagctggcaacataatatttgaaatatgcttttgtgatagcgaaacggacatggacatttataggggttgtagctggcaacttttggcccataggttttgcaatgcatttgattcaaatataccagcagatccagccgccgcagcaacaaacaaaggctatgtaattacaacctatttgccgcctgaatcagcttcatatgatggggttaacataaataatgtcttgaagtatttcaatggtattacgtgctacgtgaggggcaataataaagggatctggatcgaaacacaatatttggatatgagcaaatgtaatgagttgaaaaataaattagaatcatggttctatgaaataaaatggtaagtttttatggaataatgtagaagattattgaaatatatagtaaaatgtgaataatactgaatgactatagaatttatagggggtaaatatgaataagagtaaattaagaaagaatacagctatcggatcaataatacttccactatttttattaaatacaataggagtaagtgctaaaggtcaagaaaatgagataaacacgatgagtacgatttctatatattttaaaggtggcgatattgagaatgtatctgctaatgttcatgatttttattatagagatgatgagggtgacgcatactatactggtgatgtatctaaagtgtttgatccaaatagtttgacatcaaattctatagcattgtttataggaaatgatggtaaattacagtcacgtgctaaaattgatgcagtttcttatatagataaagatgggaataaaatccagattggcgatttagaagaaacgtcaaaaaatgaagttacagatagtacagaagaaagtaaagttgctgatttgaattcatcccaagtaggagcaagcggaagatggacaaccgaaggtcctggtggtttaaagtatattgattctaacggttcaccacacgaggggtggctaaattttgcaggtaagacgtattattgtaatggaggtgtcccagaaacacacttcttagtaaaaggtgataaaacttacctttttagagattcgggagaactttttaaggaaattccaacagtagatggagttgttgaaagtatatttgataaaaatgaagatgggattctagatgaggtagaaattcctaatggagcttctgataggaatgcaaaaaaatatattgtagacggatcgagtacagacgcctttaaatattttaataaagacggaacgatagcaaaaaaccaaataattcaatcaattaactcagatggaggtgaaagtctttggtttgtaacagataaatatggatatatagcacgccaaaaagctaaattaaaaattaatggaaaaacatatatagaatatcacactggatacaatgagaattcttcgagtgtaataaacgatccagatactaacgaagaaatacttataaatttggataaatctttaggcacatcgtaccacccaatgtatatagcttgcaatgagtggggagatactggtgcctacagatggtatcattcagattcagaaggaagaatagaaaaaagtgtttggagacaaaatgacgctaaaactaaatggtattatttagatgaaaaaggcataatggtaagatataaatggattcaaataggtggtgactggtactattttgatcctgagggtgctatggtaaccaataaaacaatagatggatatagattaggtgcagacggtaaaatgatttagtaagagaaattaaaatttatatgaatgatttataataattatagggtataaagttatggtaaatattaccaatatttgcatattgcataattcaatgcctcctaagaaaaacttcgttggatgctaagttcttgaaataattaaatcttcaatgaaaaatccttatgttttattattatatcataataatttgataatgattaccatctaaaattataagattttaagttttattgttctgcctggatttaatgtgacgagcagattacttgccacgttaggggttaattatgctttttagtaaaggttaatttcagtcctatgatcacaatgaagaattgtaatatatagaatatagattttagtaattcacccatattgatttgagaattgatttagtatatatttaatctaatgggggcagatcctcgaagattatttctttaggcttttcaaaaccattacaacagcggttaagaaagtacctattttaagtgcgagattggttagagcgtcgaaaactttaccaatctcttttattatgtttactaaattctatttctgcttccctccattattttagcgtatatatttatcatattatagatgtcactagacgcctataaagttcgtaaaattattatgcaactaagaatagaaatatacttaagtgtggataatttttaggagtaaaaaataatataaaaaagtgtttgttcggtgtttattctccaattttagagcaattttaatggcttttgtttaatgtataaaatgctttgaaacgtagtagaatagcaccctttagaactttatagaatgtattgaaaggcatggaaggaatcccgctgggagtaccaatgtgcaaagaagaatggcttaactgcaatggttaagccgtttttatttattaaaaaggtgacgaaatgatgaccaaaagtttatttgaagtaaaaagatgactaaaagtgaccacaaattagagttatttattatcatcattaaggggtttatatttaaatatattatcaagtaatgcagcagtattatctctcatatcatccatgacatgagtataggtgtctaatgtttcagatatacttttatgtccaagtctttcagatacaactttaatattttcgccattaaatattaataacgtggcatgggtatgtctgagggcatgaaatgttatctgtttgagctgcatgtaattttgaggaatattttcaccttctctttttaaatcatcaatagattttctatatttgtgtatagatttagtgaaattcattgataggtttctaggatcacacattgaaccttcacgatctaatactacaaaatcagtatcaagtgcatcacatttaattgattttaaataatcagttaatattttagctagagttatctttctatggcttgtatcagtctttaatatctctgaaaataccaatatttttaattctctatcataaataacctgattattaacagttagatacctatcttcgaaatcaatatcataccatcttattccacagagctctccaacacgcaagccagtaaatatttctattaaaattggtgtgtagaggtatgaatcgtgaatcttatctaaataaaaatcaatttcctctttagtccaaaactcgactttaggcttattcataggctgcttttctatgtcagtaggtaggttatatattaacttacttttttgagcatattttaaaacaccattaacagtttccatgattttttttacactggaaggcttgaggccttctcctataaggctattataaaaatcttgaatgattgcattagtaattttatttaacttgtatccgcccaattttggcactatgtgagtatcaattcttgacttataatttgtcttggtatttatgcttatgtgtttagatttatattcgtcaaaccattttaatatataatccttaaataaggtattaccttcagttggagcaataaatcctttatttctttttgataagattccagtaacccatgcttaagcttcttttttagttttaaagccttgctttctttcaacgttctttttaccatttgtgtatccaaggcttactgtagctctccaattggctttgatagattaaattatatgaagaaaaatagatttcattaatgagttttatctaaagtaaatacgaaataggtttgggataatggagggtgaacaatatcataactaaaggataagtatacttgatttaataagaatatgccattgataagtataagaaagaccataaaagaattgcaattaaagctttgacgataaagaaggaaacaatggagattttttcaacggtaataatatttaatacattatacaagttagtattaataatttatcattaagaataagtgataaatttatatatgtataagtaaatttgtaagtagagtgcctttaatactagaataactaatgattaaggcacttatgctattaataaagtatcataatataagtatagtttaataaatttatttaatactaaaaaatacctaaaattaaataaaatatacagttatcttacttaatatatattttaagatatatattccaataatctttttcctgtaaaagatgaagaacattttgtaatgccactaggatatcccatatatacaagttctcctccattaaagccccctagtggacctaaatcaataatccagtcagcttggcacattatacttaaattatgttctaatattataactgtttttcctttattaattaatttattaaataactgtatcaatttctttatatctgactcatgcaagcctgtgcttggttcatccaatatgtaaatttccccagcgttatttaaaagagttacagcaatttttaatctttgaagttctccacctgacattgtgtcaagagattgaccgagtttaatataccctagatttacttcagaaatagtatacaatattttatttagctctttgtcaataaagactgccaaagcttcatcaacagagaggttaaggatatcacttattgtatatgaactgtacttataatttaatatttcttgtttgtatcttgttccatcacataattcgcaagtttcttcaacatcatccataaaagctaaatctgtttttattataccttttcctttacacaaaggacatgcaccttctccaataaagctgaatagtgaaggtgatttactatttgctttaccaaagatagctctaattttatcaaaaaagcccatgtatgttgcgagtattgagcgagaagaggtatggactcttttttggtctaagagtatgctgtttggatacttgtcaaggaaaagatgtgtaatcaatgtacttttacctgaaccggctactccagttacaactgttaaggcattcctaggtatttttatagaaatatttttcaaattaaacatatttgcattattaagctcgtagaattcgtgaaactccttattttctgtaattatttcatgtctattagataaagcatttccagtggaagtatcactatttaagagctgcttatatgtaccttcaaaagtaatttctccacctttaactcctgattcaggccccatgtcaataatgtgatctgctatatttattacatcaggatcatgttccacaattataactgtatttcctttttctttaagccctttgaatatcttatttataccagttatatcatgaggatgtaatccaatgctaggttcatcgaatatatagagaacatcactcagactgctgtttaaatgttttgacattttaattctttgagattcaccaccagataaagtattagttgtacgattcaatgtaagataatttaatcccacttcttctaatgtacataaacgcttgagaatatcatcaataactgtttgaactttttgttcatggactaattgaagaaaagatttcaattcacttattgacatatcagtacaatcaccaattgacttttcattgattttgcaggacaaaatagtatcattaagacgttttccattacaatgaggacagatttgttcatcaacaagctgctcaagttcttttttatattgcttttgatctttttctaagaatgagtttctgattcttggaataagtccaatatattttgctgtcttatgccaattacttgtaggattatcaggagctttttcttcttcataaagtagagtattaagttctaaatctgagtaatctttaattggtttttcaatatcaaaataaccagactctgtataacgacttaatctccatcctccgggttgaaatgttggaaacttaatagcaccatcatttaagcttttgtcaaagtctattaatttatgaatatcaatatctttaattactcctaatccttggcaataaggacacataccatttgtattattaaaagaaaaattcattgagtagccaacaaaaggtttccctattctagaaaatagaagacgcagtaaggtatatatatcagtgacggtaccaactgttgaacgtgcatttcctcctattttattctgatctataattatagaaacaggaagattgttaattttttcaacattaggcctgccatagtggggcaataattgttgaacataagaggaatatgtatcatttaacatcctttgggattcagcagctaaggtatcgaagattagagaagacttccctgaaccagataaacctgtaattattgtaattttcttcttgggtatatttatagatatatccttaagattattttcatttgcatggaagatttcaatcatttcttttgacatattagcgccttctctcttcaaaaacactgctcacttttaggcatagctcagcaaaaagtttttgttcacttggagttaaggcagaggatgcaattttagctaaatgttcatgacctttttttatttcttttaaaaacttgaaacctttatctgttaatgctgtccaaagagcccttgcatcggaatcgcttttttcttgttttacatatcccttatctttaagagcttttaatcccttagatattttagaacgtgaaacacctaagttaatgcttaattctgcagggcgacttccatttgtgtgatataaggattctaataaatcatattgaaaccaagaaatattctctgtatttatcgtattcctttcggcaacaagttcacattgaagtctcgataatccctcttctaatttagaagtatataattgtttgttcataaagtaagtatctccttaatatttataaaagtagtttctttatggaaactattttaacatttttgcaaaatgattgcaatatggaaactatttttagaataacaatagtaaatcaatatagatgaacatagttgaatatgcttgacgtatcccgttgggattaccataaaaagcctgtagctaattgaataaataagctgcagttttttggcattattataataagaaaggtatgttcttgctaaacaaatattaaatcaatggtgcaataatgatgcagtgaattgcacaaattatagaaaatactaagctgtaatagaactgataaaatggcttgaatactagtggttagagggaaacaaatactaagagggaaatgatttaatcgaatccagaaatcgtaggttataaaagcatctatagaaatataggtgctttattttatggtgtgcccagcatgggcacgcgctaatcggtgaaagtccgtaatgggggctgatagtgctaaccattagcttaagacaagggtgtccatcgcaaggtggaatctgaaggaagtcggcggc

SEQ ID NO: 103 - DNA, 21205 bp, Clostridium beijerinckii
gcatattccctatcggggcgtaggcaaagtaataaattagaatattaaaaataataagaggtgtaatgttcgttagaaagataaatagttttctatcaaatgttacaactagattatacaaggaggtattatattgaaaccaataaccaaactagaaaaaaagataaaatatgtttacaaagacatacgtcaaatgactaaagttagtgaactcattaattatatcccagaacaattaattgaaaggtcagctctcttgctacttattttatgggtattatcaccattaattgttatactttctaataattttgtaaatgatgtagagaaaacatatatacttatgttcaaacaactatattggtatgaaatacttcaaacaattggttttcttggctgtattttaggagttatcactttttcaaaaagtattttacaagcaaaagtagaaaaagtatctttacagaactatattaaaagtaacctatttcatctatttttgtttatgatgcttatttggagcataatatcgtgtttgaattcagataatattaatatttcgcttaatggtacattgtatagaaaagaaggtatcattacatatttcacttactgcggaattttttgttgtggatatgtagtaagaaatagacgattaataaagattattttcgaaatttttactttatgtgcagtggcattatcgatattgactcttgttgattctaaggagttaaataatacattaggattaacctctgattcgtctatcttttgtcaatttaatcattatgcatattacttgtgtatgtctataatgagtgcatcgttgctatttattacagagaaaaaatcaattcaaaagctgatttttagaatcataatattttctgttatcacagctgccttaattaaaaatggatcttttggaccttacattgctgttatagtaggattgatttttagcattattttttcaattctgctagacagaaaagttttaaagcgagtagcaatagttacaagtgttttcgtagctattacgctaggtatgaacatttcaaatagtcatacttacaaggatttttggacattaggcggagatatatttaaaatagcagagaaatctccagatgctaataaagcaggaacgggtagatggattctttgggtgaatggagttagattcatttctgaaagacctttatttggttatggagcagataatcttggggatcaatatgctaaagttaaaattaatacggatcgtgcacataacgagattattcaatttgctgcaagtctaggtattccagctgcacttttatatattgcagcactagcaacttattttatgttttttataaagaaaaggaaacaatttttgaggctagatatctgtatattatgcatagtaattgcttatttagcgtcatcaatgtttggtaatactatgtattatacaagtccatttttctttatgatattaggaatttcaagcggaagacaaaagttgcttttaaaaagtttttctagctattcaagagaatctgagaatttatttttaataaaatcttaatatccctttactaaataataatgatagcaacattgatattgattttttaaataaaaaacttcacttaattaaatgatgagtgaagtttcttattttaagcaaatagtttataggatataatattaaagaaagaaaatgtaaatgagtggatatgtttagtaggaaagaaggagattattattaaaaagaagctgccaattggaatagatgattttaaaacgttaatagaaaatgattattattttgtagataagagcttacttataaaagaatttataaataattctgctaatataattttaactcctagaccaagaagattcggcaagactttaaatatgagtatgattaaatacttctttgatataaatactaaagatgagtctagaacattatttgatgaattaaatataaaaaaagataagcaaattatggagttacaaggaaaacagccggttatttttataacgcttaaggatactaaatttgctaattttagagattttacatcagcaataagaggtcttatgtcagaagtgtataaagaatatatatatgttttagacagtgataatctgttagatgcagataaagaagatttcaacaaaatactctatagtaaaggtgatattccgctgttaacaaattcaataaaaaatttaagcaggtatctatgcaaatatcatgataaaaaagtaatattacttatagatgagtatgatgtgccaatacaagaagcatatataaatggatattatgatgaggtaatattatttatgagaaatttattaggttcggtgcttaaaggtaatttatatatagaaaaagcattgcttactggaatacttcgggtagccaaagaaagtattttttcaggacttaataatttggaggtagatacaataatcagaaacaaatttagtgataagtttggcttcttggaaaatgagatagatgagattttatcatattatgaaaataacaatgttaatatagataagaatatgattaaagaatggtacaatggatatatttttggaaacaatatcatatacaatccatggtcagtactaaattatattgataatcgggaagagggatttaaaccttactggattaatagtagtgaaaatgctttagttaagaaaattctttcaaatggaaacgaggaaataaagaaagaatttgaatatttaatagaaaataaaactattgaaaaagttatagatgataatgtaattatgggagagattgaaggatctagtgagagcgtatggagttttttacttatgacaggatatttaaaggctgtcaaaaaagaaaatatagaaggtattttaaagtgtgatttagcaattcccaataaagaggtttatatatattttaagaatatgatattaaagtggtttgatgatagcttaagtatgttaaagtataggactatgcttaatgctttggtaaatggagatataagaaactttggagcattatttaaaggttttgtcataaataatgtaagttattttgatgtctcaggaaaggaaccagaaaaggtttatcatgcgtttgttcttggaatgttagtgtcactttctgataattatgaagtaaaatcaaataaagaaagtgggtatggaaggtatgatgtaatgataataccaaaggatgcttcaaaatatgggatagtaatagagtttaaaaagatagatgaattcttaagcgatacaatagaagaagcaaccaaagaagctttagagcaaatagagaacaaaaaatatgcacaagagcttttaagcagagggataaataatattataaaacttgccatcgtatttaaaaataaagaagtggaaataactcaaggcagttaaaaattttatgaactacttgttagtcaaaatacacattttttaataaaatcttaatttccctttactaaataataatgtataataaccatatgttataaattaattaatatgtcgaaacatatgggaggaaaaatatgaatacagttacttatttaattgatatattcttgcatcttgataaatatctaggattcataataaacaattatggatttgaaacatatttgctactatttttcataatatttttggaaacaggattagtagtaactccatttttgccaggagattcgttaatattcgccgctgctgcttttgctgctatgggaatgcttaatatatatgcgttactaggacttttaatggttgcagcaatcttaggagacacagttaattatgaaataggaagaatttttggcgataaacttattaatattgctggcgggaaacttattaagaaagaacacttagataaaactaataaattctatgaaaagcatggtggaaaaacaataatatttgcaagatttatcccaatagtccgtacgctagcaccatttgtagctggaataggaaagatgcaatataggcactttatttcgtttaatgcaataggcggaattctatgggtattagtagtttcagcactaggatttttctttggaaacattccagtagttaaaaagaactttgaatttgtaattatagcaatcatatttatatctatcgtaccagttatcgttgaattcttaagaagcaagatgaaaaagactaatcaaacagtataaaaaaagcctaattagggagtggaaagactctttaattaggcttttgctttaaaatgtattagtatgtaagatactcattgattaactcaattatggaaatatgttacataatttggttaaaagctgaatataatggctcttacatgataatacttctaagaataataaaaaattactggaggtaatcatataatgattagaaagtcaattcctttaataataatactgtgtgtgtttacagctttattattatctgccacattttataaaatagagaaatcaataacctcatcaactgaaaataaaaatattaatactgatattcctactaaaacttctgatgtcaataatgaaataaagccagtttctaaaagtgaaagttctaataagagtgtacctactaatacattagcaaatgaaacgcaagttgttaaagagcaaaaggctaacagtgaaattagaaaaactgatattgatacatctgattatttgagtagcttacaatgcattagttataaattgaaacaaggagaaactttgactgatattgctagaaaatatgaaagtacttgcaatctaaacagtacaattaagatgataaaatcaataaataaaattgatgatgtaaataatataaattctcaaactattgtaaatataccagagaatgcacttaaacgtggaacaatgtatacagtagtggcaggtgatacatggtataaagtagccagtgaatattatcctaaatacactactgaatctgtaatgaagtttctagtatatataaataatttacctaataatgatttgcctttaggagaaaagatttttttaccagctttatagaatattagaaatatgaattatttgtttatttatatcatgtattaagattagcagttactaagtataaacctttacagaattaaatgtcctagtaaaggtttatacttatctttaaatagaaatggcccaaaatagagaatttaatatattgcaatatttataataaattgttatatacatttataccagaaagcacatacatttttgtggaacaggcatttgaaattgagctgatgaaagttattgatgagaggttgttacatttactgcttgtcacattgaataatgggagcatgcagttatagattaataattacatattaaaatcatacattatcagaaagaaggatatacttttgtggagtgttgcattgagaatgtggcttttggagtttcttcattagaacttgttccattgttgcttgtccttaggaactaaggatcatgcaggaatgggtacaatttctaatgttagaaatccaaagtcatattctctagcaaccggaacaaaagtgtatccttctttcggttatatctattttctaattaaatgcgttatatattgcagcaattcctttttcaaaatcatcattttctataccaactaatatgttcatctcactagaaccttggtctatcattctaatgttgatttcagcatttgaaagagctgtaaatatcttagcagcagtgcctctttgtttagccattccacgtccaacagtagcaatcatagctaaatttggatggatttctatactgtctgggttgcatgctcttttaatttcttccacaacaacatcctttttgttcttcaattgagtgtcttgaattacaaagcatactgtatctattccagaaggcatattttcaaatgaaatattatgctgttcaagtattgataaaatttttctacagaaaccaagctctgaattcattgatgctttagatattgaaataactgtgaaatcttttttaccagctatacctgttacagttgttggtttcattgagccatctgtattttttacgataaaagtaccttcgtcttgaggtttgtttgtattttttatatttattggaattccaacttctcttactgggaatattgcatcttcatgtaatacagaagcacccatataagaaagttctctaagttctgaataagttattttgcttattggttttggattatctattattctaggatctgccattaaaaatcctgaaacatctgtccaattctcataaagatcagcattgatgcttgaagcaactaaagctcctgttacatcagaaccacctcttgagaatgtgattatatttccgtctttatctgctccataaaagccaggaattacagccttagaaattttagataatttataatgaagggctgaatctgtcgccttagaatctaaggaaccgtcgctattaaaaaccataacgtctttagcatcaacaaattgaaagccaagatagttagcaagtattaatccgtttaagtattcacctctacttgcagcataatcacttgaagccccttcttcaagatctttttttatgatgtttaaatgttctgtaatatcaaagtctaaatttaaatctttaacgatattacaatatctatctgttatatgattaaaaacatcatcaaaagatattccagtagaaacgtgagcgtggcaaagatataataaatcagtaatctttgaatctttagaatttctttttccaggtgcagatggtactacatatcttctttctggatttgaaaagattatttctttaacttttttaaattgagttgcatctgctagtgaacttccaccaaattttgttacaattgtgttcataattatagcccccatatatatgtatttttacatataagattgtagcaatttatctaaaaatgttcaagctaattattaataacgtttgacagagtaaatattgatttgtataataaaaataccaagtgaaacttgattatttcttgtttttcattgaaattcaacgttgaataaatcaagaaaaacaaagtagaaataagagtatgttaacaatatggtactggtaatttaatataaaaatattttaattatcaggagttatatagataagccaattataagttatatttatactatgaaatatatcctgactagaaatgggtaatatacttttgtggaatgtttcattggtaattttgatggatgtgattcttaattaaaattccaaatctatgatttggtcaattgaaattactcagtgaacgaagtgagtcgagtttcctttgaactattccaaatgtgctagttcaaagcttgttctttgaggctagcactttgggtgcaactttgtagccttagaatcacccatcagaattacctagaaactggaacaaaagtatgttattcatttcggcgagttacatgcataagttcaggtcttagttgggctatctatatgtattacaaatttatatatactttgacaacggagtcatagaattaataattcagattgatttcgtttttttgttataagttataaaataattttctgcagaagttattttttatatttatcaatttgataaatataagctttaatttttaaagaatatggtattaatttctttaaaaattaaagtttttaccacaaaaatacttacttttttaaaaaatctattgatttgttagaaatggtggtatataatttacttattaaatgaattgagcaaaggcgttcaatagatggtataccgcttctattgtgcgtctttttttagaaaaaaagggggtttgtaaaatggcaaagtacacaaaggaagatatcattaacttagtaaaggaaaatggagttaaatttataagacttcaatttacagatatctttggaacattaaaaaacgtagcaattacagacagacagttagaaaaagcattaaataatgaatgtatgtttgatggatcatctattgatggtttcgttagaattgaagaatctgacatgaatttaagaccgaacttagatagttttgtaattttcccatggagaccgcaacaaggcaaggttgcaagattaatctgtgacgtttataaaccagatggaaagccatttgaaggtgatccaagatatatcttaaagagagctatagcagatgcagctgaacttggatatacaatgaatgttggacctgaatgtgaatttttcttatttgaaactgatgaaaatggtaatgcaacaacaaacactcaagataaaggtgggtactttgatttagcacctacagatttgggagaaaatgcaagacgtgacatgactttagcattagaagaaatgggatttgagattgaagcatctcaccatgaagttgctgaaggtcaaaatgaaattgactttaaatatggtgatgcattaactacagctgatagtattatgacattcaagctagttgttaagtctattgcacaaagacacggattacatgcatcatttatgccaaagccaattttcggaattaatggttcaggaatgcatgttaatatgtcattattcaaggatggaaagaatgtctttgttgatgaaaatgataagaatggcttaagtccaatagcttataactttatagcaggattattaaagaatataaaaggtcttgcagctgttactaacccattagttaattcatacaagagattagtaccaggatatgaagcaccagtttatttagcttggtcttgtaaaaacagaacagcattaataagagtaccagcagctagaggcgcaggaactagagttgagcttagatgtccagatccaagttctaacccatatttagtattagcagctctattacaagcaggattagatggtattaaaaacaatctacaaccaccagcagaagttgaagcaaatatttttgctatgactgatgaggaaagaaaagctaacggaattgataacttacctaataacttatatgaagcagttcaattcatgagagagagtgagttagctaagtcagctttaggagatcatgtatacaacaattatcttgaaggtaaagcagctgagtgggatgattatagaactaaagtacatgactgggaattagaaaactatcttaatagatattaatttagtaataccaattattattaattaaggtggggattgcaatggctcaagatggaagaattattatagctttaagcaatattgagacagcaaaaaaattaaagagtttactaatgcaggaaggctatgaaatcatagcattatgtgcttcaggaaatgaattaattagattagttatgcaacattccccagacctagtcttagtaggatataaattcaaggatatgagtttactagatgtttatgaaacactagtagatgtaactagttttttagctatcgtaaatgagccttataaatcatttatagaagaagatactgatatatattgtattggtaccaaaatctctaatgttctcttaactaatgctataaatttaatttttcaaagcaaaaagagaatcaagaagctaagggatcaagttgaaaagttagaacatactctagaagatagaaagcttatcgaaaaggctaagggtcaactcatgaaaacttcaggacttacggagaatgaagcttttagatatatgcagaagataagtatggattctgggaaaagaatgaaagatattgcgagtttaatattaagtgaaaatgaataacttgtaaaatttagcaaatacgcgagtaattatatttcaaaaaaggatgtatttactcgttgtttgctacacataaatgcaatatgattgttttaaggataaataggtgcctgatagataaatatttaggaaggtacaaatgaatatattattatctcaagggggaattttaatggaaagaaataatccgaatgcacaggggttatataatccatgttttgaacatgatgcttgtggaattgggactatagtaaacattgatggtgagaaatctcatgaaatattatcagattgtttaactatcctagaaaagctagagcatagaggtggtacaggcgctgatgaacatacaggagatggagcaggaatattatttaatataccacacaaattctttcaggaagaattgaaatcaaaaggtatgactctcggaaacgaaggggattacgctgttgctatggtatttttaccacaagaagaaaaggcaagaaaagaagctatgagcctttttgaagatatatcaaaggaagaaggacttgaactaattgggtggagagaagttcaaacaaacccttcaatacttggaaaagcatcgctagaagcaatgcctgcaataatgcaagcttttgtaagaagaccaaatggaataaaaccaggaaaagatttcgaaagaaatttatatattgttagaagaaatatagaaaaaagagcaggatggataagtaaattcctaaatgaaactttctacatagcgtctttttcatcaaagacaatagtatataaagggatgttactatctacacagcttagagaattttataaagatttagaagatgaaagagttgaaacatctttggcattagtacattcaagatatagtactaatacattcccaagttgggaaagagctcatcctaatagatttatgattcacaatggtgaaattaatacacttcgtggaaatgttaataaggtttattctagagaaacaaatgttaaatctagagcacttggaaaagatttaaacagagtgttacctatcataaataaagaaggatcagactctgcgatatttgataacaatttagaattcttatatatgaatggaatggatttaactagagctattatgatggcaattccagaaccatggtataagagtaaaactatgagtaaagaaatgaaagctttttatgaatataatgctacactaatggaaccatgggatggtccagcagctatcgtatttacagatggcgaaaaagttggtgcagttttagatagaaatggtttaagaccatcaagatattatataactaaagatagaagacttattctttcttcagaagttggtgcattggatataccagctgaaattgttgaaaagaaagatagattaatgccaggtagaatgttacttgtagatacagttaagaaagaagttatagatgacgaagaattaaaaaattcttatgctaatcaatatccttatggagaatggttaaaagaaaatctgattactttagataaaatgaatgaaagtaagaagttcaagattgaatatgataaggaaactagaaagaaattagaaaaagcttttggatatacttatgaggaagtaaaaacaacaatgcttccaatggctgaaactggagctgaaccattagcggctatgggtgtagacgttcctttagcagtattatcaaagaattctcaaccgttatttaattacttcaagcagttatttgcacaagtaactaatcctcctattgatgctattagagaagaaatagttacagcttctaatgtttatcttggaccagagggtaatatattagaagataaagcatcaaattgtgagttgattaaactcgattcaccaataattaatgatgaagaattagctaaaataaaggcttataataaaggaaacttaaaatcaaaagtaattgatattgtatttgataaaggtggctctttagaggaagcattaaatgaaacgtttgaaaaagctcaagatgcttatgaaaagggatatactatatttatattatctgatagaaatataagtgaggcaaaagttcctattccgtcattacttgcagtatcagcacttcatcaatatttggttaaaaaaggaacaagaacttcagttgctctaatacttgaaagtggagagcctagagagattcaccattttgctacattgcttggatttggtgcttctgctataaatccatatatggcttatgaaagcttaagaggattaattgaagaaggattacttgatttagaatatgataaagctgtttacaactataataaagcagtgcttaaaggtataattaaaatactttcaaaaatgggtatttcaacaatacaatcttatcaaggagcacaaatttttgaagctataggaattggaaaagaagttattgataaatactttactaatactataagcagaatcgatggaattggactcgctgaaattcaaaaagaagcagagataaaccacaaaaatggatttaaagaaaaaacttatgcagcagacttttcgttagattctccaggatatgaaaagcttagatcaggagaagatagtggagaagagcatttatataatccattaactattcataaacttcaagaagctactaaaacatcaaattatgaattatttaaagaatatacttctttaattgatgatgaaaaagctgaaatcactttaagaggattattagaatttaactataattctaaggcaattccacttgaagaagttgagccagtttcagaaattgttaagagatttaagacaggagcaatgtcttatggatcaatttctaaagaagctcatgaagcacttgctattgccatgaacagaattggcggtaagtctaacactggtgaaggtggagaagataaggatagatggactaaagatgcaaatggggattcaagaagatcttcaataaagcaaattgcatctggtagatttggagtaacttcagagtatttagtaaatgcagatgaacttcaaataaaactagcacaaggagcaaaacctggtgaaggtggtcaattacctggaactaaggtttacccatggattgctaaaactagacattcaactacaggggttggtcttatatcaccaccacctcatcatgatatttactcaatagaagatttagctcaattaatatatgatttaaagaattcaaacactggagctagagtatctgttaagttagtttcagaatgtggagttggaactgttgcagctggtgttgctaaaggtggagcagaagtaatattaatttcagggtatgatggaggaacaggtgcatcacctaaaaactcaatcaaaaatgccggacttccttgggaacttggactagctgaagctcaccaaacattacttcttaacgatttaagagaaagagttagagttgaagtagacggtaaacttatgagtggacgtgatgttgctatagctgcccttcttggagcagaagaatttggctttgcaactgcaccattagtaactttaggttgtgttatgatgagagtttgtaatctagatacttgtccagttggagttgcaactcaaaatgaagagcttagaaagagatttaaaggaaaaccagaatatgtagttaactttatgtactttatagctcaagaactaagagaaattatggcaagtcttggatttagaaatattgatgaaatggttggtagagtagacaaacttaagcagagagaaaatattcatggctggaaagctaagaatgttgatttaagctcaatactttacactccagataagtataaaggaaaagttgttaagtttgatgaaactaagaaatacgactttaaattagaaagagtgctagatcaaaaagtattcttaagccaatttaaagacgctatagaaaagaaagaaaaagtaaactttgaaattgatataactaatactgatagaacacttggaactattcttggatctgaaataacaagagtaaatggttcagatggattaacagaagattctattactattaagtgtaatggagctgcaggtcaaagttttggttcattcattccaagtggattaacctttgaagttgaaggagatgctaatgattacttaggtaagggattatcaggtggtaaaattatagtatatcctccaaagaaatcaacatttgtagcagaagataatatcttgattggaaatgttgctttatatggtgcaacttcaggaaaagtatttataaatggtattgcaggtgaaagattctgcgttagaaattcaggagcgactgctgttgttgaaggagttggagctcacggattagagtacatgacaggtggtaaggttgttgttttaggtaaaacaggaattaactttgctgctggtatgagtggcggaattgcttacatttatgaagaggatccaaactttagaataaacttaaatgaagaaatgattctattagaagagttaagcttagaagatgaagaagaattaaagaacttaattgaagaacatgtgaaagttacaggctctcctaaaggaaataaaatattatacaactttgagacagaaaaatctaaattccacaaaataattccaaaggattataagagagtattggaaactgttgaaaagcataagaatcttggatgtgatgaggatgaagcattaattaaaactttccaagaaattaaaggaaattaggagggttagaaaaatgggtaaaccaacgggatttttagagtatgatagagaagtaggtaaaaatagagaacctaaagaaagaataaaagactataaagaatttcatttaagtcttccagcagaaaagcaaagtattcaaggtgcaaggtgtatggactgtggtgttccattctgccaatcaggagtattattctcaggtatggtatctggttgtccacttcataacctaattcctgaatggaatgacttagtgtatagaggaaaatgggatttagcttatgaaagattagataagactaatccattcccagaatttacaggaagagtatgtccagctccatgtgaagctggatgtacagcaggattaaatgggccttcagttgctataaaggaaaatgaaagagctataattgatactgcttttaaaaatggaatagttaaagctaatcctccagctaagagaactggaaagaaagttgctgtaataggatcaggtccagcaggacttgcagcagcagatacattaaataaatgtggtcataaagttactgtttttgaaagaagtgacagaccaggtggattattaatgtatggtattccaaatatgaagcttgataaagaagttatattaagaagaataaatcttatggcggaggaaggtattagatttgtaactaacgctaatattggtgaaaattatgatgcaaatgaaatattagatgaatatgatgcagtagtacttgcaactggtgcatctgagcctagggatcttgtagcaaaaggtagagatggagttaaaggcgtacattttgcagtagatttcttaaaagctaatacaaaaagtcttctagattcaaatcatgatgataataattatatttcagcaaaagataaaaatgtaattgtaattggtggtggagatacaggaacagattgtgttggaacttcacttagacatggatgtaaatcattagttcaatttgaaataatgggtgaacctcttaaagaaagaggagctaataatccatggccagagtggcctaaagttcttaaggttgattatggccaagaagaatttatagacctttatggcaaagatccaagagaatatttaactacagttacaggtcttaatacagataaagatggaaatcttgaaagtgttgatactgtaaaagttgaatggaagaaagacgaaaatggaagatttggtccagtgccagttgaaggatcagaaaaaacttatcaagccgaacttgtattgcttgcaatgggcttcacaggttcacaaaattacattaaagaagcttttggtgttgaatcagatgcaagaagtaacataaaagcaaatgaaaaagattttaaaactaatgtacacaaagtattttcaacaggtgatgctagacgtggacaatcattagttgttacagctataaatgaaggaataagagcaggaatatctgttaatgaattcttaagaaaatagcatattgaaatgggagtgatattctaagtatttagaagtatcactcctattttttatgtaaaattagattttcaatttagaaatagtagataacaataagcaagtacttggattatatgaagaatattttataaccaacatgtttatagatggtatatatattgcaaaaataatccttcatgataattataaaaatatttcaagagtcttagtcgtaattgtgaaatgtgcattgtgaactgtgaattgtgaatcgaaatatatattaggaaagtaacgccacactcagtatagattcgcatgaaatatatattttaattaataattaagaatattttcatgaatttatattaactagatatatataatatagaggtgaatattttttattctttaggaatttatattgaagataaatcttcagacattatgcaaattgaggggataaattatgaaaaagggttgatttagagatatatgttttaaaagagaataaaattgtaaagagaaattgattggaggatgttaatgagaatttttagtaatgatcgtaagcaagtaagatctggttggaagataatacttgttttcgtatgtttctttgtatctacaactataatgtcggttgtcttcagtaatatatatagtgcatttgtttttatgactaatccagcattgctgttaaagcaagatgagggtataagttatattactgagcagctcttaagtatgtcttcttttccaggcgcatttttaaatttgatacaatgtatactaatgatattctttgtagttttattctggaaagttctagatagaaaaaaagtgaaagatattggattaattaatataagaaaaggatggaaagatttattttatggcttattatttggcgcaatatcatttactatagttgcaattatattgttatgtactaaatcagttgaactagtgaatggttttaataatccaaacttttcaaggacattatttttacagcttattgtttttatatttgttggcattaatgaagaactttttgctagagggtattgcatgactgttttaaaacaaactaaaatagcatggattcctattttaggatcatccataattttttcactaatgcattcattaaatcatggaatcagtttacttgcatacgtgaatttgtttttattcgggatttttatgggatatttattcataaagactaaaaatatatggatgtgcatagggtatcatataacttggaattattttcagggtgacatttttggatttttggtaagtggaaatgttacagattctatatacaccataagaactattaattcaaatataattaatgggggaagctttggaccagaaggaggaatagttgttacagcattgcttatagtaacaattttaataacatataaattcataccttatagagcataaaatgcgtaaaaaatctacacatatgaaaagagtgcgaagcacaatacggaacttaaaaaatgaaaagagtgcgaagcacaatacggaacttaaaaaatgaaaagagtgcgaagcacaatacggaacttaaccaaagtcgactacgattttgttatgtacattgtaaattttatattcataaggtatacttaagatatgcttttaactaaatgagaaactaagtaatatagaggttgagtgtaatgaacagagaatttaaaagatatatgtatattataggaacaatttgtataatatttttagtaggatcattaattctacatattcttccatggcttctgatagcaggagtaataatatatattgttatgaagatagtgggattttttaaagaaaaaaagagaaagaagaatttaaataactattataataatgatagagataaggaagtctacagcactcctgtagatgactatacaactggagaaattattgatgttgaatatgaagatgtagacaaaaaagaaaaataatatttttatattaaagctcagttttggtaactgagcttttttgctgtctaaataattacgcataacttagttagaaaattataattttgataaaaaaatttgttagaaccctttatatatttctttttttgcgtatatattaattggaaggataaatatgcaccgataaaaagagcagctatgcactactgaaaagagcagctatgctgcaatgtggaacttttatgcatataagaacgtttttttgaattaattagtggtatatgagtatgaaagtggattgatgagaatgagagaaagaaagtatgcacattgaaaaagagcagctatgctgtatataagaatctttttttgattaacttgataagatgtaaatatgaggggtaatgatgaatatgagagaaagaagatacgcacattgaaaagagcagctatgcacctatagaaagagcagctatgctgcaatgtggaacttttctgcatataagaacattttttggaattaatttgttaagaaataaatatgaggggaaatgataaatatgagagaaagaagatacgtaaaatttagagttgatatgtatgatgacacaaaatttaaaataatagatagaatgtctaatagagatcttattcactatgtctggaataggatggttgttttagctggaaaggtaaatcaagagggagaattatatatgtcaagaaatattccgtatacagtagagaccttatcaatagaatttaatagagatatcagtggagtaaaagctgcattagatgttttaatgaatttagaaatgattgaaatcgtagataataatatatacaaggtgaaaaattttgtgaagcatcaaaatatcaaagttaaggaaaaagctgaaattgtaaaaaaggaaaataatacagaaattctagaaaagactgatatggataaaaataagaatatagaagtaaacttgaagaatgtgcttcctataaaagaaaaacaagaaattagcattaaagagaataaagataatggagtaatgcttttaaaagcaaataccaaaaaatcaaacaatgaaaataaaggcaataataatagcaatatgacggaagcaaagaaggacgagagtgatcaacataataattctcctgtaatttttgaagttgaaaaaaataaaagtaagaagaagaaaagagtaaacaaaaagaaaaatgagagtgatatagaatcttatgatgaagatgtttctgataatattacagatagaggaaataaagataatgatatcttttggtttagtgaaggcgaaattaccttaggagaaggagaaactataatatctgagtggtcttttgagtaattacaatatattaaaatttacaatgtacaattacgactaaaactccagcaatatttttagaattattatgaagaattactttttaatatatatttcattggaaaaacatatattaaaattgagtttagatattctatcttaatctagcgcttggcttactataagtttaaatgtaaatttattattaaaacatatataataatgctaattgtttgaaaatagggcgttaatattgtataattatttatagaaattaagatgtctaaaaggaaaaagaaagttagtttctaaagatttttaaagtaaatataagcaatataggaggcaataaatatggaaaaaataaaaatgtcaactccgttagttgaaatggatggagatgaaatgacaagaattatttggggcgcaataaaagaggaattattaaatccttttatcgaattaaatacagaatattatgatcttggattagagtatagaaatcaaactgacgatcaagttactgtagatgctgcagaagctatcaaaaagtataaagttggtgtgaaatgtgcaactattacaccaaatgcagcaagagttaaagagtataatttaaaagaaatgtggaaaagtcctaatggaactataagagcaatattagatggaacagtatttagggcaccaattatagtagaaccagttaagccatatgttagaacatggaaaaagcctattacgatagcaagacatgcttatggggatgtatatagggatgttgaaatgaaaatagaaggtaaaggtaaatgtgaacttgtatttacctctgagactggcgaagaaaaaagagagttagtacataactttgcaggtgatggagtagttcttgggatgcataaccttaataagtctattgaaagttttgcaagagcttgttttaattttgcactagatactaaacaagatttatggtttgcaactaaggatacaatttcaaagaaatatgatcatacatttaaggatatttttcaagatatttttgatgatgaatataaaattaagtttgatgaggcgggcattgaatatttctatacgttaattgatgatgttgttgctagagttgttaaatcagaaggtggaattatttgggcttgtaaaaactatgatggagacgtaatgagtgatatggttgctaccgcatttggttcacttgcaatgatgacatcagtattagtttctccagaaggaaactacgaatatgaagcagctcatggaactgttcaaaggcattattataagcacttaaaaggtgaagaaacatcaacaaattcaattgcaaccatatttgcatggtctggagccttaaagaaaagaggagaattagataataattcagctttagtggattttgcagataaattggaaaaggcttcaataaagacaattgaagatggaataatgactaaagacttatcgttacttgctgagcatgataacattcaaacattaaatacatttgactttattaaagctataagaaagacattagaggaaatactttaatcttattttgtgtgatttaatatttaagaatgagtgcacacaatgttatatctgtgttttaataatagatttatatttaaagtctagcacaacaagtgctaagttatgttgaaaatttagaaacttaactaatatatataaagtataaatgaaaataggctgtgcaagatagaatgtttttctattttggatagtctattttttatattcattttgaataaaatgaatataaaaaatataggaaacttagttgataacattatg

SEQ ID NO: 104 - DNA, 19450 bp, Clostridium beijerinckii
caaataaacactagttgaaaatttctttgaaaacgtataaaaaattattattataaatcaataaagagagatttatgactgtttaattgctgttaatgaaatgaattattacaaaatataattaaatagggaggtatttatgtttttagaagaatgttttgaactaataattcaaaatgtaaatgaagctttaatagtgattgataaaaaaggaattatattagttataaataaaaaggcagaagacatgtttggaattagttcagagagaagtcttggtaaatatataggtgaggtgttacctgaaatacaaataccaaaaatcacaaaagcaggaaaagctgaattatctcagatggtttttatcaatggaaaagaaattatttcaaatagaattcctataattaaagatgaaagagtagaaggttcaatagaaatatttactgatattacagatcaaaaaaaaatgcagaataagataaacctagataaggattatattgatgcgctacttactgtaatggatgcttttaatgaatggtttgtggtaataaatgaaaaaggtataattaccagtatcagtgatgattataaagaatttttaggttgcgataatcctataggaaaaaaagtagaggatataatagaaaatacaaagatggggaaggtcttaaaaacagggattgcagatataggtggtattcaggaaataaaaggtaataagatgattgctatgcgtgtgcctataaaaaaagatggaaaggttataagtgctgtaggtaaagtagtatttaaagatattagcgattttcatgctctaagtaaaaagttgctcgacttagaaaaagaggttgaattttacaaaagcaaaattgctgaaaataaaacggcgaagtattctgtagaaaatattattggacattctaataaaataagaaaagtaaaagatttaataggaaaagttgcaaatacaaattcaaatgttttaataaacggtgaaagtggtacaggcaaagaaatgattgcccattctattcataatagcagtaaaagatacttagctccatttataaagataaactgtgcctctattccagcagaattattagaatcagaattatttggttatgaagaaggagcttttactggagccaaaaaaggtggaaaaaaaggaaagtttgaactagcaaatggtgggtcaatatttttagatgagataggtgacatgaatataaacatgcaggctaaaattttgagggtaattcaggaaagggagattgagagcatcggaggcagcggagtaaaaagcgttgatgttagaataattactgcgacaaataaaaatcttgaggagcttgttaaaaagggggagtttagagaggatctgtattacaggctaaatgttgtgaaaattgtttcacctcctttaagagagcggaaggaagatattcctgcattggcaaatgcattgagaattaaaatagcaaaaagattagatgtatatgtagaggggatatctaaagatgctatagagtgtttaggcaactatgattggccgggtaacattagagaacttgaaaatgttattgaaagagcaattaatttgttggattctaatataatgataaaaacagaacatttgtctaaaagatttacaagcgctaaatacaaaagatatagtgataaaaatgaatacttgaaaaccatagttgaagaggttgaaaaggaagttattctagaatgtttaaatagaaataattggaataaaaataaaacagctcaaatattaggaataagtagggcggggttatataagaaaatagaagaatttaatttaaaagtataattaagtaggagttttaaaaagttcctacttaattgttttttaccctattttattgaatgcttatgtaattagtattcaataagatagggtacataatattagtttaaacattggtataaattttgagaatagcctatttataagcttttattaattcataaaaaaatatgtataaaaaaaatacatgtaaaggaaataaacattaacaaagattatataatattaatcttatgggggagaatctttaaaagtgtacaaaaaaaacacatatttttctgatttattttatttaaaaaggtaaatagaattaatagtaaacagtttaaaaaaataatatttaaagagtttagtagatttggaaaaggttttcgacttttggaaagaaacttggcatcctaattgctctataaaaaggtacaaggagggattatgaatgaaatctaaatctaaagttatgtcaaaagagcaagctgtcgctttaataaaaaatggagatactattgcagtaggtggatttgttggctgtgctcatccagaagaaattacagcagaaatcgaaaaatcattcttgagtaaacagttacctagagatttgacattaatatatgcagcaggtcaaggtgacgggaaggataaggggttaaatcatcttggttatgaagggctgcttaaaagaataataggtggacattggaatttaacgccaaagcttcaaaaactggctatggaaaataaggtagaagcatacaatttaccgcagggaacaatatcacagatgtacagagatattgctgctggaaaaccagggacattaactcatgttggattgaaaacctttgtagatcctagaatagaaggtgcaaggcttaataaacttacaacagaaaacatcgtaagtttaatcaacatagatgataaggaatatttactttataaaacttttcctataaatgttaccattttaaaagctacatacgcagatgaggatggatatgcgacaatggaaaaggaagcactaacacttgatgcaactgcaatggctcaagcagctaaaaattccggtggaatagtaattcttcaggttgaaaagatagttgctaaaggctcacttgatccaagaaaagtaaaaattccaggaatatatgttgatgcagtagttgttgggtctcctgaaaataacatgcaaacttttggtgaagcatttaacccagcatattccggagatgctagagtaccagtggattcaatagaaccattagagattaatgaaagaaaagtaatagcaagaagatgtgctatggagcttgtacctgatgctgcaacaaatctaggaattggtatgccggaaggaatagctatagttgctagtgaagaaggtattggagataaaatgactctaactgtagagccaggaggaataggcggagtacctgcaggtggcttaaactttggagctacaactaatccattatgtataatggaccaggctactcagtttgatttttatgatggcggtggccttgatgtagctttcttgggattggcacaatgtgataaggtgggtaacataaatgttagtaaatttggtcctaagattgcaggttgtggtggatttataaacataactcaaaattctaaaaaagttatatactgcggcacatttacaacagggggactaaaactaaaaatagatgaaggtaagttaacaatactaagtgaaggtaaggttgataagttcgtaaataaagttgaacaaattactttcagtggtgaatacgcatcaaatattggacagcctgtactttatgttacagaaagagcagtatttagattatctaaacatggcttagttctaatagagatagcaccaggagtagatttggagaaggatgtattggctcacatggaatttaaaccaataatatcaccagatttaaaacttatggatgaaagtatattcaaagcagaaccgatgggattaaaaatttaaatattaagttagtatgttatggactgatagatgaaattagttatagggttctgcaatgagaattaaacaaaagaatatcattgagttctagttagtgaatatattcacaatataaatttaatcatccatgaggaaccctatatgaacatatagaaataaagaaaaaatatatatggaggtattataatatggcggttttaggaattttcttagcattaggactactaatttttttagcgtataagggcttctcagttgtagttatggctccagtgtgtgcactagtagctgttttattatctggaatgtctattttaccaagttacacagaaatattcttacctaatttagcaaactatctaaaagtttatttcccattcttcttattgggagctatattcggtaaagcaatggaggaatccggcgcagcaaaagctattgctaaagcaatagtaaacaaattaggtaaggagagagcagttttagcagttgttttatcttgtgcaattcttacttacggtggtataagtcttttcgttgttgcttttgctgtatatccatttgcagcttctgttttcaaagaagcagatataccaaagagacttcttccagtaactattgcattaggagcgttcacatttactatggatgcttttccgggaacaccacaaatacaaaactcaataccaatgaagttttataacacagacctttatgcggctccagttgttggtatcatagcaacaattatcattttatgtggaggtttggcttatatagagtggcgtaaacgtacagctcaggcaaagggagaaggatatggtacagggcataaaaacgagcctgaatttgatgaaaatgaagctttgccaagctttggtatgtcactattaccgttggtatctgtgcttatagttactttggttcttcaaaaagtagttttcccaaattggaatatcgcatcttgggcaactcaagcaccatataacatggctgaaggcggaattacaggaacaatgaataactgggcacttattatcgggcttcttgttggtagtatacttgcatgtttatcaaatccaaaaactatgaaagttactatacctaaagctatcaacttaggtgcgatcggttcattcttagctatacttaacacatcttcagaagttggttttggtaatgttatcaaatcacttccagcatttaaatctatagctaatgctttaataggaattaattctaatggtagcccgcttctttctgaagcagttgctgtaaatgttctttcagggacaactggttcagcatcaggcggtatgagtatagttcttgacatgttcggtgaaaaatatatggcatgggcagcagctacaggtacaagtcctgaattacttcaccgtgtagcttcaatggcttcaggcggtatggatacattacctcacaatggagctgttattacacttttagcaattacagggttaactcataagcaagcatacagagacattttctttataactgtattaaaaacagggacatgtttcataatgatattccttcaaagtttcttacactttgtataaaaattgaaagcagagaggattacgaatattgtaaaccgtatttttaagttttcataagatcaatataaagagacaattataagtgagggtgttacaataacaagcataagagtagaggcttaataataaatagttctaaagagtagtgtgaaatctactcttttttattctctaggaatttatattcaaattaaatatgtggataagttatggaaaagacagattaagaaagttatgatttgtaaagagaataaaaaggaaaatatattcgcctgtcaaatttttctcacatttattcaaaaaggcagatgcgtaaaaaaatctacacctatgaaaagagtgcggagcacaatacggaacttaaccaaagttgcctgcgattttgttcttgtcaaatttatataggagtgttttattattctattagtatatagtgtgagaaaaaagtcatctctacattaagtacatggggtaaaaaatcatatatctccaacgtaggtgtataaaaatgaaaaattttatttacaagagcaaattaggataatgaaatagcaaaaactttaaatgtagaactatatgtcaaaagcagagtttgaaaaaatatgaataagaatgagattctagaagaatataatctagagacatatattaacgctgaattaagtcaaaattataaagatttagaatctatacaaagatacattaaaaaaaatggagaagaaaatctggatttattttctgaaatgttttgggctgataaaagtgatagtatcagtaatttaaagaaagaattaaatattataaataatattggttattctgatattttaaaagcatatccaaaagaaaaaaatataaactctttaaattgaagtttatgccagagttaaaggatgttagcaaggtgtatgattcaatagaagaattagaggatgaatatggatacaaaaatacaattaaagcgttggctataagtctaaatgctattacaagtaaaagattagaaaaaacaatagatgtattaataagatatgcaaaaggtgtaattaaaggtgctgatttggatgaagatagataaatcctcatggagaacctgcaggaggtcagttataaattcctgaccaacacctcagaggtccagaaaattttgtgataaattaaccctacataattctgcaggaatagtcggatggataaatatgatttctgatattctattgatgaaaggaaggttacgaaatggattcgataaaaaaatgaatgaagcattaaattatattgaagaaaatcttgatggtgaaattgattttaaaaaagtagcaaggttagcattttgttcagaatatcattttcaaagaatgttttcttttcttgcaggagtttcaatgtctgagtacattcgtaggagacgttttaccttagcagcttttgaacttaataatagcaatataagaataattgacttggccgttaagtatggataccagtcagcagattcatttacaagagcatttcaaaatttgcacgggataacgccatcggaagctcgatataatggaaaatcattaaaatcatatccaagaatgacttttcgtttatcaattgaaggaggaaatgaaatgaactatagaattgaagagaaagaagcatttaatataattggtattaagaaaagagtacctataatttttaatggagtaaatcctgaaattgctaagatgtggcaaagcttaactgttgaaaatatcaatgaattgaaagaattatctaatacagaaccaaggggactaataagtgcatctttaaatttttcagaaggacgaatggaagaaaaaggagagcttgaccattatataggtgcagcgactaccaaagagtgtccagataacttatcaaaacttgaagttcctgcttcaacatgggcagtatttgaagctgtaggaccatttccagatacattgcaaaatatttggggacgcatctattatgaatggtttccatcttcaaactacgaacaaaaacaagggccagagatcttatggaatgagaataaagatgtaacttcactaacttttaaaagcgaaatatggataccggttataaaaaagtgctagtatagacaagtaaaaaaataaagaagaagtagaaatatcacattattaagaaatgaattttgtggtatttctttatacagcagatgtcaagaaaattaccgttactcaaggaaatgtatcttgtggaatttaaggtgagaaatgaatataaaaatattaaatatacagtctggtaatatgttataacttgtaagccccacacacctatcagcccctataaatattattttttataacttgttaagattttttaatttaggataaaaaattggaattttaaattaggacctctggggtaatagtagtgagtttaagaatgacttgatatctgatataaataacaatattaagaaagtaaaaaaaacaatattcagtatggttatcgaactgaatattgttttttaaaagagcataacaatcttaactagcacaataaaagatagcttattatcatataaaaatctttcgactaataatacaacaaatcacaacctaataatcatgttttgctccaccaaacaacatatttactcaactcaatataacctcacggctatataaaatcaattcaacacattgaataatgttaactcgaccttaaataataagttggagtaccattataataaatataaatcaactataataaaacttttcctcatcatataaaatcttatcgccgactaatataacagccataatattatgaccattatataatctttgttcgacctatatacaccctaactcaagagcatatataaatctttgctcaactgttatgttccttataatattaatatgtgtaattttagttatagtatacacaaaataaaattgtaacttatggaagtggatgaggactattttctagcaatatgtgaggactttttctttacttttaacttctatgtcaaaattaagaaaaataatatttttaattatttactgcgataactctatagaatactatgagttatttgtgtacaatgtcatattgcatttcagtatttataaagaaaactcatatttcaactgaaatatagtataatgtttgttagaacaaaagaataacaatatattttgtaattataaattcacaattatttttgcaacatatatgaagaaagacagagagggaaaaatgaagattgcagttactactacaagagatgcagatgagagcttaaattataaagcaaaaggtgtatctaaagatttaaacatatcatatataaaaagaggtgattttagtatcaaagaaacaattttgaaagatggttttgactatttattagtagttgaaagagataagattgttataaagggagaagatagtgcactgttttggcatcctaatatgtcagaacttaaggttaaatcaataagacaaggaaataaggaagctataatagaggcaacaaaattagaagaaggaaatagtatattggattgtacattaggtcttgcaggtgattctcttgtcttttcagcagttgttggagaaaagggatatgtagtagggacggaaattaataagtatatagcctatttaagtaaatgcggattagaaaactataataatattaatggtaaaactatagagaatataaaggttgttaatgaatcatatgaagattatattttaaagcaaaaagataatagttttgatgtagtatattttgatcctatgtttaaagaaccaaatagaaagtcaacatcaataaattcctttagggattttgcagatcacaaagggttaacaaaaaatattttaatggaagcacttagagtatgttcaaaaagagttgttattaaagaaagacaaggctctaatgattttgaaaagctaggaatagaaaaatattatggtggcaaaaaaagcggttcaattatttatggagtaattgaaaaaaatatataaaaaatttagatgtgctaaggtaagaagttttatatgaaaggtttaaataataattagtttagtgtacaatgggataaatattaatcatagatgagaggaaattgagatgaacggaacaaagagaagtaatattaaaataggatcaacggttttagttgttcaaaagcaggatcaacgtacaggaaaattgacagaaggaatagttaagaagatacttactaattcaccagagcattatcgtggcataaaagtgatgcttgagagcggtattgtgggcagggtgaaagagataaagtaacagttacttgggaaattatttaatagtatgtataaaggttagaagtgaaaattacttctaaccttttgatatttaatataaaaaacctagaggaaaaatataggtgaatttataaagttttgtagtataataatgataaactatttaatcgaaatactaattatgtctataatgagcagtttaagcgaatatatatatataacttaaaaaagagagtgtaaaatagtctgtgtaaacttcattaggatgatataataaattatcaaatgaagggagcacaggctatgtctttatctagagatgaattagtaaaattaattttgaataactctgatataaaaacggctgaagatatacaaaatacattaaaggatttatttggagggttgcttcagcagatgctggaatcggagatggaaagtcacttaggatatgctaaacatgattatgaaaataaaaacacttcaaatagtagaaatggaaaaagtacaaagactatgaaatcaaatttaggactatttgatttagatgttccaagagaccgcgaaggctcatttgagccggtgatagtgaaaaaacatcaaactgatgtatcacacctagaaagtgctgtaattggaatgtatgcaaaaggaatgaccacaagagatatagcaactcaaattaatgatatttatggaatggatgcatcaccaactcttatttctaatataacagataaagttattccaatgcttaaagagtggcaaagcaggccattagaatcaatttatccaataatatttatggatgcaatccattttaaagtaagaaaagataatactattgtgtcgaaagcagcgtatgctgttatcggagttaaccttgaaggtaagaaagatgtattgggtatttggatcggtgcttctgaatcatcaaaatactggttattagttttaaatgaacttaaaaaccgtggtataaatgatattctaatagcatgtgttgatggtctcaacggttttaaagaagctattaaagcagtatttcctaatactgaaatacaaagatgtattattcatcaaataagaaattctagtaaatatttatcttataaggatttaaaagcctttaatgctgatttgaagttagtatataaagcacctacagaagacgtcgcgttagcagaattagataatctagaagaaaaatggggagacaaatatctaatagcaataaaaagttggagaaacaattgggatgaactctcaacatttttcaaatacccacctgaaataagaaaaataatatatacaacaaatgcaatggagagttataaccgccaacttaggaaagttactaaaagtaaatcaattttccctaacgatgagtcattgctaaagatactttatcttgcaactattgatataacaaagaaatggacgcaaggaattaaggggtgggctcaaattttagctcaattatcaatcttcttcgaaggtcgtttagacgaagttttgttttaaaaatataagaacttaactcactcaatctatacatatataatgtaataatattgaataactacaaaattaaggttgggagttttattctacctccaaccttataaaataaacatattactttttgaagtttacacgaaagtcttgacagactcttaaaaaatgaaaagcactattggatatagtgtttttcatttttttaaagtatccataccggtaaaaacaaacccaataatctcagaaattagaacttcttgagggagtggtctattctgaacttcccatttgtaagttacattataaatggaagtgctcatcattgttgcaactaattgggctcgtatttgttcattttcagctaattcatggtcttttactagcatctcatagattatggaatatagctcacaagatattttgtctcctattaaaggtaaaatagaggcaaaaccgcacttgcagatgctttttaccatttcaaagtactcacaaacgcaaagaatgaggctacgtatagtattctcatttaggcgcatctcgcctagtagtttatgggaaaagatctcagagaatttctctactatgacggtgtcaagtagtgcatatttatctgtaaaatgtgcatagaaggttgcacggtttatggtggctgcggtagtaatatccttaactgtaatggagtcaaagccttttttagtaactagtgaaataaaagcgttgataataagatcatgggttctttttactctaggattatttatatttactgaaatatcattacctcatttaaaagaattttagttaaactcatattgcagatttagttttatgtaagcaacactttatcaattttgttggttgaaaaatgtataagctaattttataatcattataagcaacacgagttggttttgcaatatgtgtagctataataattgtttgaaataaatatttatttctagggggggaaatatgtcaactataaatccaaactgtaaatgcataaataaaagctgtaaaaatcatggtaattgtaaagcctgtcgagagtttcataaatcgcaatcatatcttaatgaaacatattgtcaggctggtgcagttaaattcataactaaaggattaatatctaagttaaagttacattcttagaacacaacccagcaattcaaatgaggatttagtataaaataaaaaggttgggagtgttgaaatatgaatttagataatccgattttcaagaagtcaattatagaagttataaaagcaagaacatcgatgaggtcatataatggagtgcctttggataaaacaataggcgatagcataatagatattataaatcaggttaaagcaccttttggcataaatatacgagttaagctgataaactctaaagattcagatttaaagcttggaacctatggtattataaaaggaacttctaccttcatagtttcatcaatttcaaaatcagataatgcattagttgatttaggatattcattggaaagagcagtgctgtatgcaactgatttaaatttgggtacatgttggctagggggtacctttaataaaggtcaatttgcagaggttatggagcttaaagataatgaaatccttccaatagttatacctgtagggtatcctagtgaatcaagaagaggcatggatactttcgttaggtttatggcaggttctaaaaatagaaaagcctggtctaaactattctttgatgtagatttcaatacacctttaaaggagctggaaagcttagagtattttattccccttcaaatggtaaggcttgcaccttcagcagcaaacaagcaaccttggagaataattaaaagttctaattcatacgatttctatttagaacaaagtaaagactcaaaaagtgatagttataatgatatgcacaaagtagatattggcatagctatgtgccattttgagttaacttcagcagaattagggttagagggacattgggagaaacttaagctttcttctcaggataataaaaaatatattatttcttgggttagaaaatagggaaggagattacatatatttgtcttaactaaggaaacattaactactcacattagtagatgaattgatggaaacaaaattacttaagatagcagaaattgcaagacaaaatccaaaagaaaaatttacataattataccactatatcaataaagaaatgcttctgaaatgccataagcaattgttaggaaataaagcaacggggatacatgacgtagcaaaacaagaatattctaaagaactagatgtgaatgagaaagttattaaacttggagaatagagcatggggaggtacgcttcattttcaccaaataaggactaggattttgatacaatgcaaagccactgatttcagtagctttcagtgtttctttgataaactctggcagaaggttttaagatttagagttagctgtggtgtgtactttttagcgattaataaatagaaatatttcaatagtgtatgttattaatgatatagagtgagttttgtgttaaattctattaacgaaggtggttacggaaaagattgtgtaactactgtaaagcatggtgcagaagaatttgtaatatctaaagggggggtcatattaaatgcaatatatatcattgaggctttaactttagattgtggaactgtaaaaaaattaatatcttttttattttgcagtgatggaaaaaagatactactatataaaaaaattaaaattattaaattgcagttgttttagttactttttaggagactagaataattgcaatttttgttttattacaatttagtcacttaaaaatcgtataggctgttataataatgttaaatctataagagaggtgatataacttgaagattttactagttgaagacgataaaattattgcatctggactagaatattccttgaagcaggaggggtttgatacaatggtttgttatgatatttcctcagctaagggtgttatagaagataataaatttaatctatgcttatttgacttatccctgcctgatggaagtggatatgaactatgtaagatagttagagaaaaagatgatacacctgtcatatttttaactgcttgcgatgatgaagttaatgtagtaatgggacttgatattggtgcagatgattatataacaaagccttttcgtatcagagaacttatttctcgcataaggtctgtaatacgcagatatggtaaggacagcagttcaaaagcaatattagaattaaataatgttcgtattaatactcttgatgcaaaggtatataaaaatgatgcagaaattaccttaacagcgcttgagtatcgtctattgctaatctttgcaaataatccggggcaggttttatcaaggaatcaaatcttagagggaatatgggatgtagcaggagatttcgtaaatgataatacgctaacggtttacataaaaaggataagagaaaagctggaagatgatccacaaaagcctacaattataaagacagtcaggggtttgggatataaggttggtgattaaaatgataagaaatagagaggttagagtgtactttattattgcttttatagtatctactatagcagtagcctgtatttttttcttgaattttctagcaggaataatttcttttatagcttttgttatcttgtttgttagtagtttttggtttattaaaagagaatatggagagcttgagaaactctctggttatttgaggcgtatttgcaatggagagtattcactggatattagagataacgaagagggagaactaagcattcttaaaaatgagatttataaggtgactcttatgctttcaaagcaaggggaacttcttaaaaaagagaaaatgcagcttgctgatgccatatcggatatatcccatcagctgaagacaccgcttacatctatgagggttatgtcagacttattaagcaataatgacctagaggcggaaaaaagaattgaatttactaataatattgaaatgcagcttgatcgtatgcagtggctgttaacttctttactaaagctatctaaaatagatgctggaacggtgagctttaaaaaggatagagtagctgtatcagaactaattagaaaatcaactgagcctcttttgattcctatagaaattaagaatcaaacactagtgatagaaggcggtagtaatgtaagctttattggagatttatactggactacagaggctttaatcaacataataaaaaattgcatagagcatactggagaagatggaagaatatctatcttctttgatgaaaatcctttgtttacagaaataaagattttagataacggaagtggaatagaaaaagaagatttaccatatattttcaagcgattttataagggcaaaaatgcaggtgaagatagcgtgggaataggtcttgctatggctaaaaccattgttataagtcaaaatggagatataaatgtaagcagcaggaaaaatgaggggacatgttttattataaaattttataagataacggtataaaggatagatatttatatcaaacaaaatttaaggcttaaaaattcataagtgactaaattgtaataataaagtcactgtaaagtcatctgaactatatatactaaaaccatgataaaaaacttggaggttttaagatggaaatactaagaatagaacacttatctaaggtatatggcagtggggatactgcggtaaaggcacttaatgatgtatccttttcagtagaaaaaggagaatttgtcgcaattattggaccatcaggttcaggaaaatcaactttgcttcatatgcttggaggcgtagatagaccgactagtggtaaggttttagtagataatactgatatttataatttagatgaaacacagctggctatctttaggcgcagacaaatcggacttatatatcaattttataatcttattccagtactcaatgtagaagaaaatattactctcccactactgcttgatggacacaaagtagataagaagcagtttgatgagataataaaaatacttaacttagagaaaaggctcaatcatttgcctaaccaactttctggtggacaacaacaaagagtgtctataggaagagctcttataagtaatccagctataatgcttgctgatgagccaactggaaatctagatagtaagaatagtagtgaaatagttgatttattaaaaatgtttaacaaaacttttaaccaaacccttataataattactcatgatgagcgtattgcattacaagctgacagaatcatagcaatagaagatggtgaaattaaaaaggatgaggtggttcgctcgtgaatataataaataaattgactttaaggcatttaaaattaaataaaaagagaacaattgtaactataataggtgtaattatctcagcggcaatggtaactggtgtggctactctcgtagtttcttttatggatgtaatgcaaagacaaagtatagccaatgaaggggagtggcacgttgtctataaagatattgataacgttcaactccaatcaataaaaagtgataaaaatacgaagaatgttattttgagtagggatttaggatatgcattgttaaatggaagtaaaaatgttagtaaaccttacttatttatacaggagtacaacaaagaaggttttaggaagtttccagttgaattaagtaagggaaggttcccagaagctacaaatgaagttgtaatttcagaggacattataaacaatgctaaagttaactacaaaataggagatactctaactgctgatattggaaagagatattccgacaatagagttttgacacagaacgattattttcaaaagaataaagatactcttggagaaactttaacaaaggaaaatacaaaaacttataaaattgtaggtatgataaagcgtcctaagtttgagcccacatgggctccaggttttacagtacttggttatatagatgaaaataatgttacttcgcaggaaaaagaaaatgcgtttgtaatattaaaaagtattaacagaggactatttgattatgcaaaagatatagcagaacaaaataaaataaaaacagtagagtttaataatagcttacttagatatcatggagttgttaaggatgattcaatgcataatatgattcttggtctatccgctataatgattattataataatggttggatctatttcgctcatatataatgcttttgctatttctgtatcagaacgttcaaggtatttaggaatgctatcaagtgtaggagctactaaaagacaaaagagagattcagtgttttttgaaggagcagttataggagtaataggtattccaattggaattatttgcggatttttaggtatgagccttacgttcctatgtgtaaactctattattaggggtgttttgggaattactgaaaactttagggtagttgtatcgccattaattgttattgctgccattgtagtttctgctcttactatactaatatcaacatatattcctgcaaaaagagcttcaagtatatctgctatcgatgctattcgtcaaacctcggatataaaattaacaggtaaagagataaaaacttcaaggtttacagaaaaagtgtttggtattgagggaaatataggacttaagaatttaaaaagaaataaaggtagatataaggcaacagtattttctttgactatcagtatggtattgtttttgagtgtaaactctgttacttctgatttaaagaaatctgttattttaagtcaagatggaataaattatgatataaatgtattaatcacaggtaaaaatgcagaggaaaaaaacaatacagttaaaaaaataagcgctcttgataacataaaagagcttaaccaagtaaatacttttgatgcaagggtatggattaatgaaaactccatggcagactacttgaaaggtgacgacaagagtataatgaaaaatggagcatatccttatagtgttaatgtaaacgcattagataacgaagctcttaaaatatatgcaaaagaagttggagtagattttaacttattaaaagatacaaataaaatttctgcaatagttattgatacagttaaatataaagatatgcagactgaaaaatatgttcaaacaaaggccgtaaaagtaaataagggagaaaagctagatttactttatcatagctttgaaccagaaaaagatgagccgctaacatcagtagaaatagcagctactacagataaattaccgacaggagttttttctctagaggcaaatccagaatttaacattatagtatctagagaagtatttgataaaataataggtgttcgtgggaatatagttgaaagcattgatacaaacttatttataaagagtaatgatcctgtaacacttcagacagatattgaaactattataaatgctggaggggacaatagaatgtctattcaaaatgtatttatgaatagacaaagagaaaatcagatcattgtacttatgtcagtttttggatatggatttgttgcactaattatagctatctgcgttgcaaatatacttaacacaatatccactagtgttgctcttaggaagagagagtttgccatgttaaaatctgttggaatgacaccaaaaagcttcaataaaatgataaactatgaaagtatattttatggcattaaatcacttgcatatggacttccagtaagcattggaataatgtatttaattcatagaataatcatgggaaaatttaattttaattttattcttccatgggtaagcattttatcagctgtagtttctgtatttataattgtgggtgtagcaatgctttattctagctcaagagtaaaaagggagaatattatagatgcactcaagagtgaatagtatcaatagaattatttaatatctatgataaaaagttagttagctataaaataagaaaaagctttggagaatattaaaatggttcctatgtcaaggacattttgaaaaaggctaggcagctatgagctggtttctgtattgtacaggagccagctttttaagtccccactgatatctataattattataatactccatata

SEQ ID NO: 105 - DNA, 19278 bp, Clostridium beijerinckii
attaaacatatttaccaaaacaattttatcattattctaaatatcattcaaacaaattttttgttgcacaactacaacaaaacagttgttaaataaattagttgattttcctcattttatcacaaccattttattgtaattaaataggaaaaaagttgttggaaaaatatttttaattgaagtatgatgtttgagaaaatattaatgcattaagcataatactaaaatatatagattagaggatgtttattatggggacagaaaaaaatgaaaaagttcaattaaatacagcacagctgttagttaaatgcttggaagcagaaggagtagaatatatttttggaattccaggagaggaaaacttagaagtaatgaatgctattgaagggtcaagtattaagtttattacgactcgtcatgaacaaggggctgcatttatggctgatttatatggacggttaacaggtaaagcaggagtatgcttatcaacacttggtccaggggcaactaatttagtaacaggagtagcagatgcacatagcgatggtgcccctgtagttgcaattactggacaggttggaactgaaagaatgcatataacatcgcatcaatttttagatctttgtaaaatgtttgaaccaattactaagagaagtaagcaaattgttagaccagatacagtaaatgaaattgtaagaatcgctttcaaatatgctgaaagcgaaaaacctggagcctgtcatatcgatttacctgtaaatatttcaaagatgcctgtaagtatttgtgaaaaaccattagaaaagaaaattccaccaaaagaatatgcagccttagcatcaatagaggaagctgcaagtgagatatttaaagcaagaaatccagttatattagctggaagtggagctattcggaataatgctgcaaaagcagttacagaattcgcaagtaatttaaagattccagtaataaatactatgatggcaaaaggaataattccttttgataatatatattcaatgtggacaataggaattccgcagaaagattatgtaaataaagttattgaggatgctgatttagtagtcacaattggttatgatatcgtagaatatgcaccagcaaaatggaatgtaaatggagatactaagattgttcatgttgatacaagaccatcacacatcaataagctttaccagccaatagttgaagtagttggtgatatttcagatgctttatataatataatgagaagaacatctagaaaagaagagccagttgatgcactaaaaatcaaagaaaaaatggttaatgaacatcaaatctatgcagaagatgaaagttttccaatgaaacctcagaaaatcttaagtgatgtcagaaaagtaatgggaccccatgatattgtggtttcagatgttggtgcgcataagatgtggattgcaaggcattataattgctatgagccaaacacctgtataatttctaatggttttgcaacaatgggaataggagttccaggtgcaattgcagcaaaattaataaatcctagcaagaaagttttagcaattgttggtgatggtggttttatgatgaataatcaggaaatagaaacagcacttcgtataggtactccgattgtcgttttaatttttaacgatagaaattacgggttaataaaatggaaacaagaggatcagtacggtaagagctgctatgtagaatttacaaatccagactttgttaaaatggccgaaagtatgtatgcaaagggatatagagtggaaaagtcagaagacttaataccaattttagaggaagcctttaagcaagatgtgccagtaattattgattgtcaggttgattatagagaaaatacaaagttaacaaagcatttagcagaagtatataagaatctttaagcaaaaaatatgattaagagatgatatttaaaacgaggcgctagagaacgaaaggctaattgttaaaacagaaatttgtttatttaaaatatataaggaacttatttataaatttaaatctctaccggaggatactgaattaaataaatttatagggaaaactctggattgcaaggaaaaagaagtagatgataaaatagaagaataattaaacgtgctaattcctaaaaaagctttaagagatagaatattctagaatatgaactaatatagttaaagatagtatagtaggaaagtaaagacgtttgatgataagtaattatgtagaattagcaatagaaacagatatgaaatatatttatattaaatacaaggtagagtagtgttacgttatgatgaattttcttaatttagagtattttttaacagcagcagaagagctgaattttacaaaagcggcaaaaaaattgtttatttctcaacagtcattaagttctcatatttcaaaattggagaatgatttgggggttgaattatttaatcgtacagtgccattaacattgacaccagcggggaaaagtttagtgaaaaatgccttaagaattttggatttaaaagagcagtcagtaaaggaattggcagatattaaagatttcaaacgtggagatttgtttattggagcttcacatacaagaggacgagcctttttgccagaaattcttccttattataatgaaaagtttcctaatattaatttacatttacttgaaggaaactcaaaggaactagatgcagctttattaaaaggtgacgtagatttaataataggaatgttaccttttaatgttgaaaatgtagagatggttccactttgtaatgaagaagttcttatggttgttccagataatatattagttaaatattttcctaataattatatggaagtaaaacaaaaacttgaaaaagatatggatattacattactaaaagattgcccatttctaatggttaatgctaaaaatagagttagaattattgcagatgaaatgtttaatgaaaaagaaataaaacctaatattatattggagacagaaagcattgaaacagtgctggcactttcagttaaaggaatgggaattactttttatcccaaaaccttaatgaataataaagatttaatattcgataagaatacaattactggagttaatctctatcatctgaagtataacaaaactcatggtacattagctattggataccaaaaaaatcggtatgtatctcaagctttaaaagaatttattgagcttgcaaaagataagtacggaaatatagaataatagcataagttattaattagcgttctagttctataaggtgttaaacacttttagtaaactagaacgcttttattaataaagggtaaaaggaataagataaaggagctgcttactttttgctttggaatttgactatttagtaatttcaaatttaagtaaaatatattccataactaaaacttcctagaagttaaattgattttcttttaattgaagaacctaaatggataaacattataggtttaaagattaaattaacttgagcttttttagccttgcacaatagatgaagtttcatttaagaaataagatcttgttttagcagatagaattcctgtctatttatcagttgtatccaatttgtcaatcaacatatctccatatctaaccatttcatcaatacttagaggcatattattttcaagccaccaaatggctaaactaaccattgaagaagaataaaattctgaaagaattggcgcagggattaaaaatattagtccattagcttcgtcactttccaatctagattttgtacgtccaactactattttttgaagcacttttattgtggaaccattatttaataggccgactgaatacatctttatattttcttgcatatgttctaatagaagtctaaataaatttacatagtattgccttggattatcaactggagtttgttcagtgcttttttcttcgaaattttggactaattgactaattaaagaatcaagcaaatgatatttatcttcaaaatgtttataaaatgtagttcgatggaccattgccttctcacagatgtcagtaatggtgatattgtcgaagcttttttcagaaagtaaaagtgttaaagcatcaaataatagtttatgtgtccttcttattcttaaatcaagagttttattattagtcataagctcctcctaaggaaataatctacacatatgtaattgtgcagattaactatatagattaaggttattgtttcttgataaccctcatacagcagtatatagtatttgttgtacacctgtaaagtttgtatacatgtgtagattataaaactatatttaaatattttaataatggagaggtggatattaatgagaccaaatataaaaaatctgattgctgttggaattttagtaagtattataaatagtagcactgcaccagtatttgcaacagaatctgcatctaccgaaagtgaaaatatctcaaaacatattaataggggggaaaacgtaagcgttggacaaggtatacatgggcatatagatgagagagttctaaaactaactgatgcaataaatgcggcaataagtaatagtgataagtttgctttaaaatcaaaacaaataacctattatcgaaataaggaggatcttcaagaaaaaagcactgattttaataaatccttagaaacagatacccattactctgatgatgtatatgattatccttacgataaacttgaattgcaggaaaagcagacaaaacaatcaagagatttcatggaggataaaatatcgagtgatattaccaataaatataatgatatggttttaaagcaaattgatatagataaattaaaaagaaacttggaattaaagaaaaatgatttaacttatttaaaaggaaagctgtcgctcggaatggcaacagagaatcaagttactgatactgaggttgaattaaaatcattacaagatgatataacagcaaaggaaaatgctttaagtgatgctaaagattatttcaaagtgttaactgatttagatttaaagaatacttacatacttgattatgatatggattatgtaaaattcaaaatagatggctcagttgaggaatatatagatgataagcttaacagttattttgaatatgatgataaaatattagatttaactaaggactatctgaaagatttgaaggacgaaggaataaaagacattatgaataaagatataccaatagcacctaaacaatccgattatattacaactgatgctaatggtaatactacattagattctggtgggcttgctttggcgtcaatagcatatgaacaaaaggaattaaagtattatacagatcttaagaattatgaagcttatctagatggtaaatacagttacgatgaatcaaaagttaagttagatgatacgaaaaagagtcttaaaaatatattaaaacaaaattactcaacattacttgatatagaaaataaaatagataacttaaaagaacagattaattcaacaaatactaaacttaaatttgcaaaagctcaagtagatatgggattaatgctacaaaatgattatgataaacaagttatagcaagtgaagaattggatactgctttaagaaaacttatttatattcataataacttaagagatagtattcaaaagccatggatattaagtaactaataaattttttcaatgaataaaaattattcaggaaaataaactcaataaatattatgttttatgtgcgatatggtgaatataaggaggatatatgaataagaagataatagctatttgtttagtaattttaaattttacaacattaagtggatgcagtaaaaatgataaaaaaatagatgcaaaaacttatccagtgaaaacagtagaacttcaaaatcaaagccatttaagtgatttagaatatgagggtataacaggaggaagtgaagtaagaaagctttccttcaaaagtccagctaaaatttcaaaaatatatgttgtaaaaggtcaaaaggtgaaaaaaggagataacctggttggtttagataaaagtgacttaaatttggcagaaaatgctgcaaaagctcaaatggatgcagctcaagcccaatatgataaagcagtgaatggagcacaagccgaggatataaataaagctcagatagcagtaaaaaatgctcaggatgagtataattactgcaaggatttatatgataaaaccgttaatttatttcaaataaaggcagctacacagcagcaggttaacgatcttaaaattaaattagatggtagtgaaagccagttaaatgcagcaaaggaaacattgacacagcttcaaaatggaacaagggaagaggataagcaagcagcattggcacaggtaaatgctgcaaaagctaattatgattcaaaggttaatttagttcaagatgcatctcttgtagcagatgaagatggttatgtagtagatgtcctttgtaaagaaggagaaatgcaacaagctgggtatccagtaattttagttagaagtgacgatcaagtgattactgcaggtttatcagatgatgatgtaaagaaaatacaagtaggaacaaaagcagaagttaaaatagatgacactactactgatggagaaattatgaatatagttcaagcacctgataaacaaagtggaacttacagtgcagaaatcaaaattttaaatccaatagataatgataaatattacgtaggtcagtctgtgaaagtttatattgataatggagaaaagagtggcatatggattccaattaccagcattttgaatgatggacaagattatgtttatacagtggaagatggacgtgctgttaggaaaaatgtaactttaggagatacaaatgaaaatgaagtatgcatagatggattagaagttggagaaaaccttattactgaaggtatgaaaaatataaaagctggatatcaggtttcagcagaataaagggggatgaattatgggattgattaaagcagctattagaaataaaaaaatagtattatttttaataactatagctattttaagtggatgttattgctattatattgttcctaagcaggaaatgccagatgtttcatctccagcagcaatgatcacaacggtttatccaggaggttctcctagtgatatagaaagtttagtttcaaaaaaagttgaagaaaaagttgaagaaatagatggttatgattattgtgagtcttactctgtaaataatgcttcaatagttgttgttttcttaactaatgattgtgataaagagaaagcatggcgtgatatgagagataagataaaagatttaaaatcagatctcccagatggatgtcaggatagtgatataaatacgaatcttacagaaactgctggtatgattctaagtgtatctggcgataattacacatatgaacaattgggaaattatgcagatgatataaagaagcagctaagcaatgttagtggtatttcaagatttgatataaagggtaagcaagataatcaggtaaaagtggaagtggatttaaataagataaataaatatccaatttcttttgaagacatatgtggagcattaaaagctcaaaatgtagatattccttctggaaatttagatttaaaaactgggaaaatgaaagttgagacacctggaagttttacatctcttagggaaatagaagatactgtggtgaatgtttcaactgatactggacaaactattaggcttaaagacatagccaaggtttatatgggttatgatgatgattctagtcttaaattcactagcaatggagaaaatgcagtattgcttacaggttattttcaagataataaaaatatagttttaataggtaaggatgtaacaaaaaagttagatgagataaaaaaacaattaccaccagatttgaaaatagagcaagttacttttcagcctaaggctgtagatgaatcagtttctttctttatggagaaccttagagatggtgtgattctggtagttataactgttttaataggaatgggatttagaaatgcaatggtagtatcagcagtaattccgatatctatatctatgtcatttgttgctatgaatgcccttggtattaaggttcaggaaatgtctaccacagcacttattatagctcttggaatattagtagatgatgccattgtaataggcgatgttgtgcaggtaggtattgatgaaggtatgtctggagatgaagctgcttttcatggtattaaaaaattatttgtgcctgtattcacatctacattgattattattggtgcttttgcaccacttttaaatatacctggtggagcaggagaattcttaagaactttgcctcaggtagtaatgatatgtattgcgtgttcttacttatcagcactgtttgtaactcctgctatggcatctatattttttagaaaaagtaaaaaagttgagaaggaaagtataataaaaaggtttttccataaacttttaaattatggacttaagaataaaataaagattattataatatgtttatgtttatttgcagtatcaataggattgctgaattcaataggaacgaagttctttccttatgcagataaagacattctttatatagatgttgctaatgaaaaagtggataatattgacagcacgagtgatttagtaaaacaagttgaagatatagtaaaatcagatgaagatgttacaagttatacgtcagctataggtggtgctgtgcctaaattttatattactatacctcctcttgcaccagcaaaagataaagctcaaattatgatgaacatagacctaaataaaaccaaaaagttcagtacaagacaagaattggctgagtatttacaaagtcaaatagatagtaaaatatctggaggtactgcaacagtaaaactcttggaacaagcaatgccaacaggtgcacctattcgtataagacttacaggagatgatttagagaagctttattcggcttcagatcaaatacaagaaaaattaaatggtattccaggaactacaaatgtaagagatgatgcagcaaaaaagacttatcaatatgaagtagatatagatagtactaaggcagtacagcatggtttattaaaatctgatatagaaaagcagataagcattgctataagaggatatgctgcttctgtatacagaaaaaatggaagtgattacgatatactagttaaaagtaatgctacatcagttgaagatttaaaaaatttacaagtgaaatccagccttgcaaaaaacaaggtattgttatcagaagtagcaactataaaacttgattcacagatagaccaaataaaacattataagaaagataaaactgtaacagtatatagcgatataaaaactggttataatgctgttaccgtagaaaatgcattaagtccggaaataaataagatggatatagatggtgtaaatgttatttatgatggtgagaaacatcaaatagatttgaattttacaagtctaggtatagctgcagccatgtgtatactaataatttatgtgattttatttgttcaatttaaatcttttgtacagccacttataataatgtgtgcacttccactatcattaataggagtaacggcagggcttctcacatttaagatgcagctatctttaactgctgtaatgggaataataagtttaattggagtagttataagaaatggtattctgcttgtggaatatataattgaaggaagaaaagaaggtctttctatagatgaagcatgcttgaatgctgtaagtcaaagattcaggccgataatactaagttctgtagcaactattacaggtcttataccacttgcattttcaaaaagtgcgttatttggacctatgtctgtaaccataatatttggacttgcatcagctactttccttacattcgtagttgttccagtggtttattctttagttaatactaggttagaggagatatcaataaagcctgataagccaagtgttaaatcactgaaattctggaaaaagcaaggataagtgaataaaatagctactatttatgatgctaatatctaaaatagtggctatttactgcatttgtgatcattgaataagaagaggtttagtgctgttttaaaaatgttatgtttatgggtattgttgcagttatgtggaataaaagtacgtgagtatatcatataccttcactagaaattataaatatatttgtgaagaaaacatttgaaaatgagctgatgagattattagttgtaaattgttccactttagcttgtgaagtgagagtccaaaattttattttgggttcctcgaacttcctcagcgaatgtaatgagtcgagcttccctaggaaagtgggagcatgctaaagtggtgaaatctgcaacttagaatttccagcgatatttttatagtttttcggaacaaaatatttataatttcggtaagccatgacataagttcaagcttatctataagttctaaagaatgtgcaaatttcttcagcaaaatgttcaggatcttccatggctgtaaaatgtcctcctttaggcattgtagtccagcgagtgatatttaaattgcgcatagcccattcttttggtggtagcaatacatcagctgggaagatagccatgcctgttggtacatctatgtgtcccattggtggcaatgaatgtgtattttcataatatgcatttgctgatgagcctatggtatttgtgacccaatagatcattatattagtgagaagttcatctttgctaaagtttttacttaaatcaccattgcaatcactccaaccgcgaaatttttctataatccatgcagctaagcctactggtgagtcagaaagtccataggcaatggtttgaggttttgtagattgaatagacatataacctgcttcgtttgacatccattctgaagcaattttcttataattcaattcatcttttgaaagctctgtatcatttgacatcataagatctctgataattccaatatcagttagatggattcctattagaagttctggatggtttaatgctaagtatcttgtaacacctgaacccatatctccacctgcagcagcaaacttactgtaaccaagtttttcagtcattagctttgcccaaagctcagaaacacgataattgttcatgccactatgttttgaagcactagaaaagccaaagccaggtagcgaagggataattatatcaaaagaatcattaggatcaccaccataacttgcagggtcagtaagaagtggtataatcttttgatagcgtatgaaactgtcaggccatccatgagtaagtataattggggtaggattaggtccctttcctttttcgtgtatgaagtgaatatctatcccatccacattacagcaaaaatgagaaaagcggtttaattctttttcttgtgcacgccagtcaaactcatccttccaatacgaaacaagtgattttaaataacttatattagtacctcgttcccaacttaagttttctagcagctcaggccagcgtatatgatccaatctgtattttaaatcattaagtacctcatcagatacttggatattgaattttttaatagacataataattctcctttcatataagttattaacagtgagttattaatagacttattttgcataactttctttaattcttaataatagtctaccatttagaaaatatgatacaatgtcataaatgaagcttttaactatactatttgtaagagaacaagaacaaaatctcaaaggcgactgtggaattgtcgacttttgatatagggatttttttagcatttgtcttagattttgctattgattaatgaaaatataaatggtaatttaaatttattatttattttaatgtacctaatggaggaatacttatgccacaaatggatcgtcacaagaatagaactgtatatatagaatttattgcaaatgaaaactttgtaaatcttccttataaagagcgtttaactataacctttattacgagtggaagcatgaatttacaactaaatggtcgccctgtgaaaattgtcgctccaagtattctttgtttatcaatggaagataaaatagaagttattgaaaaacaaaatgtatcttcgcaatcattttgtttccatccagatttttttaatacagctcatttctcagaaaatactggatatctgtcaactaatctaaaaataaaaactggtcttttactttttggaaaagataaaattcatactagggtatatgctgtagatgagaaaatatatttgaaattatatgagtggttttttattatgggaacagaagtatatgcacaaagtgactcgctttgggtgtgtagaataaaaaaatacttaatacaaatacttggattgattgaagagctaaaccaccatagcgaagaatcacctgttaatttggttttagaatatatacatataaactattctgataaaataacattggaagatttaacaagatgtgctcatttgaatcgtgtgtcactaaataaaagttttcaggatctatgtggctgcacagcaatggcctacttactagcgtaccgcttaaaggtttctgagagtctattgactcatactgatatgagcttaaacgaaattgcacgtgccactggctttgaatatgatacatattttataaaacaatttttggctaaaaagggtatgactccaacagagtttaggaaaaactcaagagagttttcaagtcaccaataaaaaatgtgaaatatatttgagaagataaataataccatttaagaaatggaattagcaatagtagaggatactgaagtttataaaaatcggaatcctctatatttatggtatttaatgtattgtaatcttattttaagaatatactatattcttaaaagtctaattcataaaagcctatcttaactgtgacataatgtgagtttgataattttataaggaatgaatatatcatttaaaacttatatattcactgctaaaaagtctaattcattagtaggagttcatgtatgcaaatgaagttattggaaaaatatttttattatgtatagatttacagaacttgaatatttatgaaattaagaataaaatgatataatgacagaaaatgttgaaatatgaaattatttaatagaaacgtataaaatttaagttatagtttctcgataattatataaagtagaaatttattaaaatattttatgccggaggtggttttatttatattagtttatttatttcgttaatgttatgttgcgttttttattcattcctagggatatatggatacaggatggacaaaaaatcaaaagctaatcaaatatttttaaatttaagcatgtgttgtgctgcttgggcacttggatatgcaatgatgctgacttgtgaaaatataaatatagcgtttttttggagggcagtttcagtttttgggtattgttttttttctggtcactggctgtattttgcacttgtattaaataatgagaaagaaagtaaatacaatcggattataataattttagcccacgttcctgctgcattattatttttatgcaatattatggttgaaccatcttcagctatgattagaagaccttatggatggattgatgtggctccaaatttatttggtcaaattgcatacagcatatgttctataattttttatgtatcaggtcttgtaatgctatttaatagagggagatattcaaaaaagaataggataagaaagcaaaataaaattattttatggacatgttttataagtattaccataggggtattaacagatattattttacctatgtttggaattcttgtctttccttcagtagttttgagtggaactatagcgttgggtggtgtttgctatgcaataagtaagcacaggtttatgttaactacttcgaagtatttatcagaatacatttttaatagtgttaagaacccaatatttattttagatgagaattttgcaatccaaaattgtaatgaagcgtcatcaaatataacagattataaatttaaagaattagaaggaaagatgttcagcgatttaatatcttataaaaacattgagtttaatactataatagaaaatagttatgtgagaaatgtagaggttaatttacaacaaaaagatgaaggatacattgtatgtgaattatcaagtacagttatatatgatgagtatgacgataaactaggtattgtaattttgatacatgatatttcagaaagaaagagaatagcagaaatagaaaagaaatatactttaaaactggaaagaaaaaattcgaaacttgtagatcaaataaaagataagatacttgcagaagaaaaaattcgtcattatgtatattatgatgctctcacagaaattcctaatagaaaaatgatgttagaaaatattaatcaactattaaaaaataaagataaaaaatttgcaattctttttatagatttagatgattttaaaaatataaatgataattttggacatcaagttggtgacaaagttcttaaaaaagtagcatctacattgaaagattctataggtccacaggatataattagtagaattggtggagatgaatttataattatattgaaaaatgtagagtctgatatatacattaaagaaattgctctaagaatacaaaaggaattgaaaaagccaattacttataatgaagaatctttaattcttggagcaagtataggaataagtatattccaagagcatggagaagattcagatactttgattaacaatgcagatttagctatgtatgaagttaagaaaaatggtggttatgactttgctatatattcacctaaaatggaacataaagcaattgataaattagaaatgaagatgaaattaaataaagcattatcaaataatgaatttatggtttattatcaacctattatggatttaaagtcaaagaaagtgttaaattcagaagcgcttataagatggaagcaaggggatagaattattccgcctatagaatttattcctatagctaaaagtgtaggagaaataataccaatcgataattggatgttagaaaatgcttgtatacagtgcaaaaagtggaatgaaattggatcgcatgaatttagtgtatcagtaaacacctcttattctcaactaaagcaacctgaatttgtatcactcgttcaaaatatattggaggcatattctctgccgtctgaatacctgaacctagaagttactgaagatgaggccatggaggattttgaaacaattataaacatattggaacaatttaagagtatgggaataaaaatatcattagatgattttggaacaggctattcatctcttaattatgtaaataaattgcctattgataaaataaaaattgataaatcccttataatgaatttggaaacaaactataaaaatctaacgattattaaatcaataataaatatgggacatagcttagatattaaaattgttgcagaaggaattgaaacaaaagaacagcttagaatcttaaacgagcttaaatgtgatttcattcaagggtatttaataggaaaacctatggaagcatccgattttgaacataagtttattaattaaattttcgtttaagattaagctgatccatataaagaggacttattttaatgaattccatactgtttagtaatggggtccataaaaatcggcaatttaggaggaagaaaagtaaaaagagtaaaacaaattattattaaagaacctattataatagataaataaaaatgaagcataattaatgttgcatatttataaatatgcaaagataaacattgagctatagaaagccctaaaaataatgaaaatatgtcaagaaataatgattgtattccaagagcacctgtgtaggtatagaaaaagcaagttataacaatacagctagtaataactgaaatgacagagcatatggcccagatatacaagttaactttatctcgaaatattaaaatgcctagtatataccaaataaaagtaggataggtagaaagttttaaatgttcccagatactttcgttaacaggagtaaagatacctactataactgatttaccactccaatcatatgcaaagtgagctaatgatccaagtaaaaaagtaattggaataccgataataaaccaaaattcaggacttaaaagcatgttgttcataatttagatacatctccaatttaaattatataactgctttaaataaagttatagatatccaactataatctgtacgtatgcgtatacctcaccgaaatgaataatatacttttgttccagtttctaggtaattatgatgggtgattctaaggctataaagttgcacccaaagtgctagcctcaaagaacaagctttgaggctagcacatttggaacaacttatagccaaggataacatccatcaaaattaccaatgaaacattccacaaaagtataccattcatttctggttggaagatatttcatgggttaagtatagttcattattgggttatctatataaactaactataaagcagtttcatataataaatatatgtatcataaatgaaaattaaaacctaaaagccttatgtaaaattttgcttaatactttcagcgaaattttcatagcttttcggaatcaaaatatttatgatttcgtaaattaacacataaatctaggttttaaagttggatctctatataaatcatagttatataaagtataattaatatgcatttcaattatggtatctgttttgatatactatttttaatgtcaggtatatttaaaatggaggtgtttttatgaatattaagtggaatgctaaagggtatacgaaagattttcagtttgtacatcaatatggtgaagatgttttaaatttgttagatattgagaaaggaattaaagtcttagatcttggatgtggtaatggagcattaacgaaaaagatttcggacatgggagcagatgtaattggtatggatgcatcaggagaaatgctggaaattgcaagaaaaaattatcctgaactaacatttatacaggatgatgcagtgaattttattttaaatgaacaagttgatgcgatattttctaatgcagtttttcattggattgataatcaagatggattgctagagagtgtttataatggattaaaaataaacggaagcttagtatgtgaatttggaggatacggatgcacagaaacaatccattcatttttgcaaaaggcttttgaagcaaggggattagaatataagagaacattctattttccaactattgatgaatatactcctattcttagaaagcatggactacaaacagtatatgcagcattatttgatcgtaaaaccgcacttataggtgaagatggaatgaagaattggattgaaatgtttgttatacagccttttaaaggcttagatgactcgttaaaaaatgaaattattgatgaggcggtaaaaagcttaaaacctattctatatcagaatggagtatggtatgcagattatgtgcgcattagattgaaagctagaaaaatataagatatatatgttggaaatatactagttctaaaaatatcgtaagaattttaaccgtaattgtgaattatgaaatgtgcattgtgaattacaaaatatctatagaaaagatacgaatttagaggaatatcaatcataaatggtgaacaaatatattatagtaataaaataatattaaagctgcaataacatgtttattaataaacaaagcactgtctttagcaggagtttatgtaaagtaagcctttaaatattggaggaaataatgaataaagaacgtaaaccacatatttataatgaatataaatatgtaattgatgaaattaagaacttactaaaagataatgaaaaattagtaatagccattgatggaagatgtggcggagggaagagttccttaggagcaatgcttgcagaagagtttgattgcagcctttttcacatggatgatttcttccttcctccaagaatgaaaacaaaagaacgactagcacagcttggtggaaatgttcactacgaaagatttgaggaggaaatcttaaagtcattaaaaaacgacgagcctgctgtatatagaaaatatttatgcaataaaggggagctaagtcagcctataaaagtagaacctaaaaatttaactatagttgaaggaagttatagtctgcatcctacattaagggattattatgattataaaatttttataactattgatcctaaagtgcagcatgaacgaattctaaaacgtaatggtgaagaaaaacttcaggatttcataaacaaatggattccactggaagaacattactttacagaactagacattgagaataaatgtgacataatatttgatactacaaatataaagagatagatgaaaagttcatttagataatacgatttttaataaaaatattaaatacgggaatgtggataattgtggaaagagtgagagttaatgaaagtatataataaattagtaagagataaaatcccagaaataataaaagctgatggaagagaatgtgatatagacgtcgcaactaaagaagagaagtatgagcttttagaagccaaactaaaagaagaagttaatgaatttctggaagataagaacttagaagaattagctgatgttatggaagttttgtttggacttgctgacagcctaggctttagtgaagaagagcttattaaagctagagataagaaaagagaagaacgtgggggatttaaggaaggaattgtccttaaaagcacaaaatgatcttgttgtgaaaatataacagcaatagaggtaaatgacagaatatgttggctttctaggttatgttcgcatgtttaaaaagatgggcataaaaaattctaactaaaagccgtatatgattttactaaagagagtttacacaaagtaagctctctttttatggtgtgcccagcatgggcacgcgctaatcggtgaaagtccgtaatgggggctgatagtgctaaccattagcttaagacaagggtgtccatcgcaaggtggaatctgaaggaagtcggcggc

SEQ ID NO: 106 - DNA, 19179 bp, Clostridium beijerinckii
atataacataagtaatcaatatttctactaagtaataattgacaaaaacatcaaacaatatacaattatcttattaggatatagggggaattataaatgaaaaaaatagttagtagattaatatttggtttcgtattattttcaataattggatatagcggcattccagagaaggtgaaaaatgaatatattaatagtaataagtatgcaggaatacatataaaagaaataaaagagagatcagttctaaataattcaggagaagaaataggaaaaagaggagaagttacatataatcctgataaaataacagatgaagctttaataaatttttataatgataagattaagaacactgggtataactattatactttaacaaatgaaaaagataaaactcagggtattgtttcaattgcatgtgtaaatgtattaacatattcagaaatagatgacaatggatatatagtaaaagcaaataaaaattttgaagtcaaataggattgtataaattataacttttgacttcatatataagttaattaaaagaaggcactaaaatgatctctaagactattttaatgccttcttttaattgattttttaaggtgaaattttagctttaaacttgaaatttcttctcagctttgtcgtaatcttttaataaatgattcttccttttaaatatgaagtaatatggaacttcataagctaacatgaatatccatcctatgaggcttgcataggccatacttatcatccctacatgagaaactaatataaaaacgaatattactctaaaggatatttggataagtgtagagattaatgtaattttcatgtttcccatgcctctgaagaaaccttgaataccatttgtaaatgcaggaaataaataaaaaaatgccataagtcctaagtaactcacacctaagtcaaccatgttattatcattagaagagacaaataatttcattatgggtgtcttaaaaattaatacaaccaagcagattattatccaatagcaaaactctatgaataagccaactctaaatccagctttaatacgatttttattatttgcaccacgattttgagcaacaaaagtcatcattccatgagatatactttgttgtggagtgaaagcaaaatcatcaactctgtttacagcattaaaggctgctattgtagctacccctaatggattgatagcaccttgaattaacaatttgccgattggctgacaagattgctgcaaagctgttattgatccatgctggagagtttgttttaaaagcgttttatctaattttatatcctttttagatagtcttaacaatggtacttttttatatatgtaaattatacaaaatagagcggagcaagcttcagcgatagttgtggctagtccagctccaagtactcccatattaaagcctcctataaaaataaagtcaagacatccatttaaaatagatgctatagctaaaaatcttattggtgtttttgaatccccaacacttctcattgctgcagatactgcattatatagatatgtaaaaggcattgcggcaaatattattcttagatagagtgttgcagattcgagaatttcatttggaactccaaggaggattaatatattcttagagaggattaagcctaatattacaattattagagaaaaaaaacatccgaatattaaagttgtcgaaatctctttttttaattcttcatatttcccagctccaaaaaattcactcataagaactgatgctccaatacatatacctgttattcctaaaattacaatattcattacaggattagccgttccaacagctgccaaagcatctgtaccagaaaatcttcctactatgatcgaatctacggcattataagtaagttggagcagatttccgagtattaatggaatagaaaagcttataagatgcttatgtatattccctttagtcatatctttagtcataattttcacttccttaatatttcttcattaggttattatactaaaggttagattacgtattcaacaaactaattagagaaaatgtttcattttgaaatcattttaactttctccataatgtactatgactaattttcaatcttttctcaactttgacctgattcattccttcttcctccattacatgctttataatacgagtttctatttcttttaagcttccatttaaattaatagggattagagaagcatttttgtgattttcaaattctacttttaaggctgtttttacttcatcaacattaatataagagccattacatttaagtgctaattggtttacaactctcataaattgtcgtatattttcaggccaatcgtattcagatagtaattttataccaccttcttttatacctacaacctgacttgcacatcttaaatctagttttgaaagatacatacttaccatattgctgatttcattactgtaattttttaaaggatttaattcaattctaacttcatcaattattgaacggagttgtctaagtaaatttccattgctaacacagagttcaacagggaattcgcaagatgtaattattttaatagtattgtttatagataatttttttaaaatattagctatctttttttgcccttctgtatataacgtatcaatatcctccagaaataatgtgccgccttcgtttttaaaattatcaattatgattttatatagaaagtcgtagttgtaatattcaggaatagagtgacagcttatacatattaagctttttcttttttgaggaccatagtaagtgcataaatatccgatatcattcttacacattccgtcttcgccagtaataattgttggaagtggtgtgttacttagatatgatatttgagaaagaattgtttgaggaaatactgtatgtacaaagcttggtgatatttcatcaggatttaatatttttataaaatcatcaatattatttttttctcttttttcataatatgtatagtcaactgctttggattttaagtctttattattaaaaagagcgttgcataagcgtattgattcatcaatagcgctttttacagcttcaattccacttgtaataagtatgctattaattccaaactcctgcgctgtttcatataccatattatcgccaataatgagttcatagttttcttgttttagttctttaattatgtctggaatatctttatgttgaaaataacactttgattccattgaataacctaaaagttcgcttaactgtttaaatgatttaaatatatttggataagataaaaatattttttttcctttatatccttcagataattttaaaattctaagtatatcaaaggcattaatatgaatttcaacaataggagtttgagtgattttcctgcaaatttctgcagtaccacctcttgttatgatcacatcatattttttgtttatatttacttgtttcagaatttttggtccttgctcataattgccttgatacacatcaatttgaaaatcattatattcagatgaaactgacattgcgatctcttttaagccaaagtagggtgctaaaaaaagtatttttgctttcataattttatttactccattaattaatttattatactattatatcaaatatataaatcaattaattaattacatatattatctatatttaaaagtatggagatccagacacttaattgcaacatatatatggagtaaatatgtattcaattttcgctgatatacatataagtctggctctcattatagaaccctataatatattgacacctaaaaaggcagttatctataaaataaaagtttgtgtttataattgaaagaagccagtgtttttacagcactggcttctttcaattacttagtagtttcttttaatataataatataaaatattatattatcttactggacaaactccatttgcgcactctttatcaattatttcatgttcgtcatcatcatcaagttcagctaataattcataatctataggtttaatattttttatacgctcctcataatcttcttttgttgtagattcataaggtaaaagagggtaagtttcgtctgttagaggaaggaaagttataccgaccacatagtcaaaattctcatagagccaattggcaacatcatcccactcattttctcttacatgtacggtaattgaagtattgtgatcagtccaatttatcattgataatttataaagttcaagttgttctatagctccaacatcatattttgtttttccgtaaggagctttgatcggaaattctataacttttgttgtgcaattttcatcactttgaccattttcattataaattggatagcattttagcttttctatcattttatatagaggatcagatgtagagattctaactctcctaatataataattagaatgtgaataatgtattcctgaacttacacatggaagtgtggatagagatccttcaggcttaattgttgtcataagctcaggaatggaaattccaagttctgagcagtatttaatcccttcgcatctaactacatctcgtaaacgctttagcaataaacctaaatttttataagtcatgtttgttctatttaccatatccatcattccagttaatgatattccaacgattctatcattttgcatgattttattccaatctggaagttctacgtctactagggtcattctaatagctactctagtagatagttttattattttttctaatttatcaatatctagattattatcttcatttacgaatgaggctaaattgttagttgataggttgcagcattgatgtgaattaagtaaaatttctccacaggggttacaacctttaaatgtactttttcttctcatagcttcacttccattaataaaaccaggttcaccatttatctttatggattctaggattttctttattttattaagcgatggtttttctttatataaaacggaattattgctcattttcctatgagatacttctgaattttcaatccaatttccattgactattgtatatagtttactttttgcatttataacatcttcatcattttcatcgcaaattatcatcattgcactacgcctaactccaccagaaactacattttcacttattatagtagctatatcaagcacatctatggaccttaagcttccattaacaagattactgcaaaccttatttattttttcaaacattctttttaacgatttatgaccagatgctctgccaccaaacctttttaatctttcaccctcaggtcttacataactgtaatcaaatgtaattttcttaatattaatatattcaggacttgtaatcaaattaaagtaagtttctagggcgttacaccagccttctttgctgtcaccaattttaatcttagcgactgatggatctccatcgtctaaaataagtttggtgttttccatatattcttttggaatgaacttatgaatatcttcattatattcgctgtctagatatattctccttatattaggcattcttgatattagagatttatctattctaacaccgacacctgaaccaatcatgagaagataaaatatgtctacaaaatcatggaatttttcaaccattgtaaatgcacagttataatttgaaagtggatattcttttactatatcagttccccccatataaagagttctacctgatgtaaaggtccttaaattgaataaattatcaaataacagttcagcttcttttacttcatcttgtaaatttatgcttaatccctgtttctttttaaattctatgccaagttcaatattatattctgttgttctaagaactgtttcaaaccaagtttcccttcgttttttattgtttaaatatctagaataagttcgtaaataaacaaattcaccgatattgcttaaaggcgtattcctaatttctctgtatttgtttaaaaatgattctgataatagttcgctcatatatattcctccagttttacttaataagctaataatttctttctaatccttatattcttttgaattataatatcttcaagttttataataacattattttaaatcattttatgataaaatacaatatgttgtatttataaaaaagtattcatacaatatatagagttgtcccattcgctataatgattgattttgacaagtaatatgaaaatttaattaagtatatttaaggaaggacttataaaataaaatgtaattttataaagagattatatgagtaattgcataaacgtgatatcaatcacagttttatataataaatcgtgatactgtaatttagtaatataaattttaagcggctttagctatagatctaaatataagctatatgcagttacttacaggtataactgtaggttttttattgcgctcaaaagtttcataatataaattattacttttagctaaaattagcacatagaccgcttgcgcagaaaggatagataaaaaacaatgactaaaaatgagcttgaagcattaaaattagaaggtttcatgcagcaacaagataaagaatatttttcacttagaatattgacagatgcaggaaatttaagttctaatgaaatggtttgtctagcagaaatatctgaattatatggaaatggatacatgggatttacaacacggcaatgtgttgaaataccttggattagagaagatttgattccagaggttaagaaaaggatattaaacgcaggaatcaagacaggaggcactggtacaagggttgtagctgtagctgcttgcaaaggagcactttgtaggttcggattattagattcacaagaaatagctaaaaatctcgatagaaagtttttaggaatagatcttccaggtaaatttaaaattggagtagcagcatgtcctaataattgtgtaaaagctccaatcagtgatttgggttttttagctcaaaatgaaccaaaggttgagacagatatgtgcaaaggatgtaagatttgcgaacgtacttgtaaagttgacgcgatatcaatggtacataaaaaagcagtaatagattatgataaatgcatttcttgtgggcaatgtatcaaagcatgtccttttaaagctatgaagttagataatgaaggagttgcagtatatttaggtggcaagtttggaagaaatttaagaataggaaatcgtcttaaaaaactttaccagcctgatgaattggaagttattacagaaatggttattgagtattataaaaataatgctatcaaaggtgaaagattaggaatgacaataagtagactaggttttaatcatataaagaacgcactagatatatagatgttgctatagttaattctcgtttaatattattttaatgattatgttattaaaacataatcaaatggtttgacaatgatgaataaataaaatagaatgatattaaacgataataaagtatattaaatgagaatgaattactatgggggagatgtaatcatgaataaagcagttttttttgacatagatggaactttaatggactgtttaaatggaataacagatattaggcctagagtaaaagaaacaattcgctcacttcaagcaaatggagattatgtatttattgcaacgggcagaccatatgcctttttaaatgagtctttgtataattttggatttgatggctttgtccttaccaatggggcatatgtaaaagttaaggaaaaatgtatatataaagaatgtcttaaaagggattccataaaagaattagtgtataattttgagcagcgtaatattcaatatattttgcaaggagaaacatattcatacattaaagatgaatataaaaaactacattctttctatgattcttttagtatatctaaaaaatatttccaatctgaatatgatctagaaaaagtagagacgtacaaaattgagatgttatataatgataaaagtggaatggattattgcttgaatttagcgaatgatgattacgattatattcataatatagagggaaaatcttttgaactatattcaaaatcaaatacaaaggcaactggaatattaagagtattggactttttagatattccaatagaaaatagctatgcctttggagatggtaagaatgatatagaaatgttgtctacagtaggatgcggaattgctatggggaatgccgaggattacgttaaagaacacgctaaggaagtaactgatactgtacaaaatgatggagtagctttaggaatagagcgatttatctactaaaatagacctgcattttatttattaaaatgcaggtctattttagtaaattttattattatttatactaatctaaaaaatcatatgatttatttaatgaacctaaagaatactaaaattaaaatttttcaaatattatttgctgcctatattaccaagaaatatgcgagaatacaacatatataaccttttcatatgcaattatgaaaattatatctatatgtaacaaaaattacttttgtgtttgatacattcttatcctataatagggcaataccatatcggtggggaaagtaacctagaatattattaggtcacaaataaaacacaaggagtggtaatttgattaaattaaaaataaatgttataaaaacttgtatatttctaggagtatgtttgctaggatttgaaacaacctttttagatcagcaaactaaaaatattcaaataaatagaattgttacaggtagctataaagaagactttaatctcaaaaaagaaagtgccgatattgagaaatatgcagaatcagtaaagaaatcagatgaaggttcatctgattcagtaaatgcatcatcggtaaaagagcaaaagcaaataggtaaacctattaaagcagaattaactgcatatagtgatgatcctagatgttcgggaaaatggaagtcacaaacagcaatgcagacaacaacaagaataggtgttattgcggccccatctaatataccgcttggaagcaagatgtatattccggagttggaaagttataagcctgatggcatgtttgatgttgaagatagaggtggagcaattaaggtaaaaaaagatggcacttatgtaatagatgtttgggtcccgtcatatgaagaggctaaacaatttggtagaaaaactactactatatatctattagaataagaataagtataaatttaaaattactttaatatctgtgattttatttacacaaatatcctaagggaagttacatctttcaatttaaatatttataaaattatatgtaatattgttaatattcaattggatgaaacccttaggaacttttagaaaaaatataataatgattttattattacaagcttagagtgaatttgctatgtattaatttagatataggtggaatgttcgcttatatctttttgttttataataaattttgtatattataaggatatgttaatggaagcataatgtaatatttaatagtacatagtatactaataatataatcttaataagactaactttctcaaattatttaatattataaataaatgtaatattgttgtattaacttttatgattcaaaacgaaaattctgctaaattatgtagaaaaataatgaataagacctcgttaaatggtataattgaatatatgtgtataaaaatctaatatcagattattgaggtgaattatgaaaacctataatgttaaatatagggactttaaaactttacaattatatgtaaatagcaatgacataatgaaatataataatatattagtacaggtgttttctgggatatgcaataaagagtttataaatgaagtaataagaaatttaaaattattaattcctcaatgcaaaatagttggggctacgtcgtcaggtgaaatactaaatggagatatatttgaacgggagtgcataatctccataagtgtttttgagaaaaccataattaaatccatcttagttaaggataatatatctgattttagtaaaggtgtgaaaatagctaattgtctaattagtacagatacgaaggcaataatatcttttggcgattcaagcattatgggcgaggaacttttaaatgggataaattctgtaaatgatcatgttctggtagctggtggaattgctgggaagagcgatccagcgtatgaaacatatgtttttacagaagagggagtagaaaaaaacgcagtagctgcagttgcattaaaaggtgaatttttaaatgtaaataacggaagtagttttaattgcatacctatagggaaagaacacgagataacattggtagaagataacatagtaaaaaagataggaactatatcagtaaaagaattttataacaagtatttaggtactaacaataatgatcaaattctacgtatgggaaataagtttccattaatggtaaaaagaaataacagatattttagtgctcacatattaaaattcataaatgcagaagaagcgcttatatctacaaagctggatattggtgaaaaaataaggattggttttggtgacttaagagagattttgcaaagtgcaaaggaaatgtatagcgagattacaaggtgcccatgtgagagtttattaatatattcatgtgattcaagaaaaaatatatttaagaaagtaaatgcaaaggaaataataccgtttaaagatttatctgtaggtggtttttatacctttggtgaatttaataatgttaataataaaaatatgttttacactgaaacaatgaccgtattagtactttcagaagatgtcaatgcaagaattaaaattatatcagaaattgatgatgaatactcttattttaatgaggaggattcagcattatacaacctgataaagaatactggggaagaattaaatcaattaaatataaaattagaggaaaaaataaaagaaaaaacagatgagttagaaaaacaatattatacggacaagttgacgggtttagaaaatagaaataaactaattaatgacttgtgtgtagaaaaatacactaaacttacaattattgatataaggtcctttaatgatataaatgatttttatggaaatacaataggcgataaggtattgaaggatatttctaagttaattagttgttactgtaatgagaataaattaaattcttacagagtgaattcggatatatttgctatagcaagtagtgatatagcaaaagaagagttcattgcaagaatacaatttttacaaaatgaaataaacaatcaatgtttcgtttacgaagaaggtaagattttcttaacaattgtaatgggagttgcgttagaagaagaattattatttgagaaagcagaaatggctttaaattatgcaaaaaaaaataaagaattatttcaaatatatagggaagatcttaacatatatgagggaatcaaggaaaatataatatggactaaaaaaattaaagatgctatagctgaaaatagaatagttccattttttcaaccaatagttaataatagtttaaagacaattgagaaatgcgaggctttaattcgtatgattgatgaaaacggaaaagttatatctccatattttttcttggatatagcaaaaaaagctggattatataaagaactaacgataataatgctagaaaaaacttttgaagttttaaataaaactaattatgaaatatctataaatcttcttcttcaggatataatgaacagcgaaattagagccctaattataaaaaaattaaagaaggtacgaaaccctgagaagattgtatttgaaatagttgaatcggaaggtattgaaaattttaatgaagttactgaatttataaaagaagtaaaaaaatatggatcaaaaattgcaattgatgattttggaactggttattcaaattttaactatcttatgaagctaaatgtagattatataaagattgatggatcaattattaaaaatgttcataaagataagtcagcagaaattgttacaaagactatagtattatttgcaaaagagttggggatagaaactattgcagaatttgtatctgaagaagaaatatataataaaataaaagatttgaatgtagattattctcagggatattatttttcagaaccaaaagaaaatatagggtgatttttaggcaccctatatttaagaatgattgacttaataataattaataatactttttgtagttggggaaataatgtttaatgaacttattaagttgttaaacattatttgccttttttaatttagaaaaataatatattaagcatgtaataaaggcacatgtaatctttatcataagatcggttgcagtatcttcaagacttccatttgtcatatcagttttaaaaaaataatctgctaagaattcatatatctcccagatggtacctattgcaattgtgaaacaaaaggcaaatattaaggtgaatttagaaaatttttccttggttgtatttttagttttttctataattccctgtaaaagatgtactccaattataaccccatatacaccaaatataccatgaagaaataaatcccaccaccagaacatactatagaactttaaagtttctcctagatataaagtagcaaatataaatattattgatgctgataaaaaactagatggaaggattattttgttagaattagcaactttaagaacgataaaaggaataaatatgcttatagcatcccagagtaaaaaaagtagataactccacggatttgatgaggcggtcctaatagccgtaataataattaatatttcaagtaatattgctaatattacgccaattttactgcttttgttaatcattaaaatcaacccctttttaatgtatatacttataaatatttatagggagtctaaatctaatgatatcttttccttttttatataaaaatatgtgcatttaggaataggcttgtcctagagtaaattgcttttatattaatttactctagtaggaggcctttctataattaattcttatgaattacaggaagatttattttttttatataacaaatcattctgattgaaaaaataacgattaatgatatatgctgggatacatgagttcctaaaagaggatatagaaaccacagtaaaattgaaccaaggatacatgcaatgcagtaaacatcagttttaaaaatttcaggctttctattggtaattatatctctaagtacgcctccaccaaccccagtaatgcttgtagcaaatagaaatagcattaaattatagccactttcaagagctttaattccagaagagacagaaaaagctgaaagccctattgcatctattatcacaaacatattattatattttagttttccacgaagtataacaggaattgttgcacctaaaatgataaaaggaatagttgtatagttttcaaaaaataatggaattccaacatccgttacaatatcacggagaactcctcctcccatagctgtgacagtagcgagaatatatataccgaataagtcgaatttttcctcaattgcaacatgagccccagatgctgcaaatgcaaatatgcctagatactccaatatattaatatcattcataaatcaaacacctctttcaattaaattttatgcataaaaatagacgaattgcataaacaattcgcctctgttattttacctgaaagattctcttttaatagttaactaaaaagattgcttcttgggtgtcataagactttccagagtttcgtcagaattcggtccttttgcctgagagtttgttgcgatttcaccttcggctctacattgcttgtagcatctcccaaattcgtcacacgattactataattaatcagaaatattataaattagttttaatagcatgtcaaactaatttattcaattcatcttcgtgtaaagtttctttttctaataattctatagcaatcttatcaagagaagctctatttttatttaaaagtttcagtgtttcattgtatagatcgttaacaatatttttacattcttcaataacaggatttccataactactatataaaggacctacacttgatagatttataagccctaaggtttctcccataccatactcagtaaccatttttaaagcaatatcagtagtttgagatatatctccatgcgctccagtagaaattttatctttaccaaaaattatttcttctgcagctctaccacctagtgaaactttaattttatttttcaaataatctattctgtggtaattggtatcttcaggaatagataatgtataacctccagcaccttttgttgtcggtataattgttattttagaaactttatcctgtggaagtaatagcatattaactaatccatgccctgcctcatgatatgcagtaagaagtttatcttcttctttaagataacttctttcttttttttcgtggccagctaaagttatagaatatgcgttttctatatggtcataagttatataatcactgttgtctttggctgctaatatagcactttcattaactaaactttctagctttgcaccagaaaaatatactgtttttttagctatatctttaatatcaatattttcatgtggtttgttctttaaatgaagagataagatcttttctcttgcattaacatctggcaatgcaacttctatatgtctatcaaaccttcctggtctaagaagagctttgtccaacatatcaagtctatttgtagctgcaattactacaattccttcttcttgtccaaatccagacatttcagttaaaagcgcatttaatgtttgatctttttcatcgttactagatccattttttccattacctcttgctttacctatagcatcgatctcgtcaataaatattacagcttttccttgagattttgctttcttaaataaatttcttactcttgcagcaccaactccaacatatacttggacaaaatcagaaccactgagcgcataaaatggaactcccgcttcacctgcaactgcttttgcaagtaatgtcttacctgtacctggatcaccgtaaagaataacgccctttggcattctagcaccatacttttgatacttttctgggttcttaagaaaatctacaacatccattaaactttctttagcttcttcatttccagctacagcatcaaaatttagggctgctttcttatctttgctaaaatcttgcatttccatcgatgttacagaagaaacgccaccttttgatttatatacaagcatcgcaactattgcaaaaagtgataatcctaaaattccagaaggaatagtttttgaaatagggggagtggtctcgtccttaacttctattccatttagtaatagcttttcttttaaagtatcagtatgcggattatctgtagagtatttatcaccgctatttagtattacagtcattttaggagaagtatcaactattacagttgatattttattagaattaagatcttcagtaaaataagaataacctttattaactacctttgaatttattgatgttactaccattactataagagacaggatagctgttattataggaataataatatagtatttttttatcttattcattaagtacctccaatttcttaaaagatgacttaaggcatacatatttataacttattttgtaagcctaatattgattatacaggtttaaaattagaagtctaatttctttcattgattttaccaatgtaatttttggagaaatactcaatcaactctttttctgaatgcaaaaaatttcattaatataaatgtgattggaacgcctatgattgcggctaataaataagcaataagtttatttaatcccatgaaattaaaaactattattacaactatattttggataataaaatttgggatataggatattgcaaattttataaatttatttaattgtagtttttctttaaaagttataagactattcaataaatacgatataatcaaacccgaaatatagccaactataaatgctatattctcatttaaaaaacttgaatatatataagaaaaaacagttccgttaaatgtatttataacccctattattaaaaaagtaacaaattcttttgtatagaaagtgtttttgaatttttgaactatattatccataagtttcctcctgcaaattttctcatctatgctaattaatttattaaagatgagaaatcttattttttatttaatttcattatgtattttctgaatatattttagtattattcaagtgaataagagttgaagcttactataaaccatattgatgaaaaaatgaacttataattaacataagtccaatagaacaatccccttaaaaataaactagtatctataaacttgtattaataattataaagagcgtttatcaataggtttatcattataatgattatgcattatatcaactcaaagatactctatcagtgtatagaaattaaagttgtttattaccattttaagaaaagagttacgctggctgaagtgtcttattcagtaatcaatattacttcaactataatattgttaaacaaatatatcaataaaattgatatatttattgtaaatctatattaatatacagtagcgttaacctaaacatagattactaaaagacttatgtatattttaactatatacattatttctgaataaacgctgaacagatttcaagaactagctttatttatgatatttctacgttatattacatcttagagtcttagagtctacaaaaattttaagtatatattataaagtatattggttattcatataattaaatagatttggcaaatgattatgaaatatcattgtattgcaaaatgtcattcatgtaatttttagtaaacaatattaaatacaatgatcgttttatttaaatttgaatataaaaatatacaagtgaggtatatatatgataagaccaaggcctttaaagaaaggtgatagaataggattaattgcagcctcaagtccaacaaaaccagatagaataaaaccctcaattaaagctatggaagagctgggatttgaagttgttttagggaaaagttgcaagtgttatcatggatatttatctggaagtgatgaaataagagcaaatgatattaataaaatgtttgatgataagactataaaaggtatttttgcaataaggggcggatatggagcagcaagacttttggacatgctggattacaatatgataaaaagaaatccgaaagtttttgcaggatatagtgatgttacagctcttcatactgtatttaatgaaaaatgtaaatttataacttttcatactccaatgatatcaaccgaattttataaaggtgtagatgattacacaatggattattttataaaaaatatatttagtgataggccattaggaatattaaaaaatccagatggacaagaaataaaaactttagtaaatggaaaagcaataggcaaattggttggaggaaatctgtctttagttgcttcatctatgggaactccatatgaactcgatacaaaaggaaagatactattcttagaggatgtagatgaatatccatataaaatagatcggatgttacttcaattaaagcagtgtggaaaatttaaagatgctgcgggaattattttagggtcatggactggttgtgatccaatagaagggaataacagtttaacattaatggagatatttgaagaattgataaagccagaaaatactccgacaatttataatttggcttgcggacattgttctcctactataagtattccattaggagcaaaagtaaagataaacggagaaagaagcgaaatagttattctttagttgagtatcaaacattatacattggagtgattttatgaaaaatgcaatagttaataatactataggaatgttaaaacgtgagccaaaaaataattcggaaagcgtagatgaagtactatttggaatgaatgttgaaatactcaaagaggcgtttaataattggttttatgtaagaactcactacaaatacgaaggatatattaatggtattgatttaataataaatgataaattatcggaaaaatgggaaacagaaaaaaattcaatagttattaattcttttgcagatattcttaataatcctcaagcatctggatttccaattgcaactttgacaagaggtgctaatttaatttctacttctgaatatagcaaagacaataagtttacaaaagttatattacctaatcttagtatgggctggataagaagtagtttcatatccaatttgaagagcggttatgatataaatgatgaagaaggtcttaggaataatttagtgtcatcggctgtatcctatattggaacacagtataggtggggagggaaaactcctcttggaattgattgttcgggcctctgctttatggcatatatgttgaatgggattctaatttatagagatgcagagattaaagaaggttttcctattaaagaaataacatttaagcaaataaaaaaaggagatctaatattttttccaggacatgttgctatgtacttaggcgatggcaaatatatacattcatcaacaagtaatgatgtagtaaaaataaatagttttaataaaaattcaaatgactataatgaagatctagatagaagtttaaaacgatttggaagtatattttaaaactgatttcataaatcatgtaatttggatggtataatggattagcaatgcaaagagctgttaacagaggatggataaatccttatgattcgccacttaaacaattagcaaattcttatagtgaatcaaagcatataattagcgagatcaaagaatagtaaaaagatttcaagaaaggtgcctatttgtaatattaaggcgccttttttaagtacttaaataaatattaatttttaaataaaatgatcattgaaatatttgaaatagttagtaatttaatcaataattttgaaatatatctatttata

SEQ ID NO: 107 - DNA, 19131 bp, Clostridium beijerinckii
ttattaagtttactaataatttcattctactttgaagaatcaaattaaatcttagattaataaatctaaataaatagtattttctttgtaaaaactaaatcctatttaatttaacacaaatttaattatcatatttccttttttaatgaaacttgctcttttatacgtttcaatccctctttaatggcagtagctctcgcttctcctattccttcaacattatctaagtcatttatatcagcatcaattatattacttaattcttcaaattcttttataagattatcaataacattagatggtattcttggcaccttactcaacattctatatccctttggagatattaatgtatccataagtggaattcctccacgacctaatgttcttgcaactgcgtctaattctaataattctgaagaatttaatttttgaatgtgctcatatacctcgttatattgaagtccatctttacagtaatccctaattagcaatattccatctctttctatatgcttaactaattcatttaattgcattgatattaatcgtccttcattccccaactctagtatatacatattaatttcttccactattctcattaccatttcagttctttgaattgctgtaactacatcgaatagtgttgttaagtcttgaaactccaataaattcaagttattaataacacgttcaagtactgcaacatatttttctagtgtttgaagcgcttgatttgcctttccaagaattacactactttctcttaatacatactttatatcacccttgtacatagttattatatttcttctttgagaaattgcaattactatgttattcgtttgcttagctactctatgcgccgttctatgcctagttcctgtttcatatgttggaatagatgaatcaggtattaattgcgcattagcacaaacgattttctttaagtctccagttatgactatagctccatccattttagctaattcgtatgcatatgatggtgtatactctgaattaatataaaaaccgccatcaacgagtttcataacttcttcatcgtcaccaatcactaataatccacctgttttagctcttaatatattttcaagaccttcccttagttgagtgcctgggcacattatctttaagacattctttattcctattcccttttctattctcatacactcacccattttctttaaaaatcattttaatacttttctagatttatttaaaatcaaatattaaacattttgactgatattattttccgagtaaatttaacctaggctctagaaactataatactataataaatataatccctcaacaacatttgttaaatttaagttataatatatttatttgtaagaaatagctctattctcttcatatttaatatggcatttctataatgttctagcttctataaatattatttattacatccatcaaggtctttaattcaattatatctattttctttaagttactgctttttcctatagaatcctttggaacataaacctttttaaatcccattctctcaagttccctaatcctactttctaatgatggtacttttttaagttccccagtcagtcctacatctgctataaacgctatatctgattctatcccctgctgctttactgaggatactatactcattattacagctaaattaatgccctgttctcttatttttataccacctgtagttttaataattacattcttatcgtataaattaattcctccacgttgttcaagtatagatatcaaagtgtttaatttatcctttcctaatgtttcccctattcttgtaggatacggagtaaaactcttcgacactaaactttctatttcagttattattgctcttgttccttctttaattactgttaatgcacttcctgatacaatttctccttcttcacgctttgtcatgaagaattctgaggggttatctattgaaataatccctctctcccccatttgaaagaagccattttcaataccgccaaatctatttttagaacttacaagtactcttaactcttcatcactatcatcttctattataagcaccgtatcaactaaatgttctaaggctcttagccctgcaagttcatcacttttagtcatctgcccaactattataaccgctcttggccttctaccgtttttagccatttggagcaatgcattagcacattccatagtttgtgtaggtgaccctgctctcgctggcaaagatgattccatagtaaatgtttgtatactatctattattataatatccggatctatttcttcaactgcatctaaaacattatcaagacttgtttcttgtagtacccatatatcttcgtggattttattaagaattctgtctgctctgttttttatctgactatcactttcttcccctgacgcataaattactttatatcctttttgggcgacagcatcggaaatttcaagaagaagtgttgattttcctgctcccggtcttgctgttataattgaaattgaatcctttacgattcctccacccataaccctatcaaattcatttatccctgttactattctatcgcttttgttggaaactatctccaaaagtttttttaacggtttttttgctacttgtctggatctagtctctaaattttttgcttcaatagtaatttcctctaatgtattccaattattgcatgttgggcatttaccaagccactttatactttcaaaaccgcaactattgcatctatataatgtttttttcttcataaacctctcccttcgtttctagatctttattacatcttacttttttaataataatattaattatattatagcatattactttcttactcatatattttgaattaaatatagctagtgcttagccttcaatcaattattatatataatactttataactattttattttttgttcttagaatatttaataaattattgcaaaagctattataaaatagattagtaaagaacaaatatataataatatagaaattataatattaacatcaacactagaaaataaacataatatataattcaccagttatgtattaactaaattactctctataatgattattctaataatgagacaacaatatataaccaagttataatttaattgataataaacatcattattttatagctatattgaatgattataaaatctatattataatattaattacaatataataactattattaaggaggcgtattcatttatggtaaaagtatatactaccaatacttgtccttggtgcgttaaagcaaaaacttttcttaaatcagagaacattgaatttcaagaattaaatgttcaagatgatatggaagctagagaagaaatgataaaaaagtctaatcagatgggtgtcccagtattagatattaatgataatattattataggctttgataagcctgctattctaaaggctttaggtaaataattaagaggcgtatatccgcctcttttattttggcttatatcaattaatatctgatttatattctcatctttaatgctattttctttttcgtaatatatatttttctgcatttaaaagcgcaatcgtaccatctgatacagcagttgttatttgcctatacttcttttgtcttacgtcccctgctgcatatactccttgaatatttgtttgtaaatcttcatcggtaattatatatccttgttcattcaattttatataatcctttacttcttttgttctaggctctgttcctatatatccaaaaactgcattaacatctaagctactactttcttgagtcttagtgtcttttataataactgattccaaaaattccttaccattggcttgagtcaaatccttatttaatagaacttctattttaggattattgaaaacttcatcaattaatgactgttctcctttaaaataatcataccttcttattaagtacactttttcagcaaacctagttaaaaatatagactcctctagtgcagaatttccgccgcctacaacagcaacttttttgccttgataaagtgctccatcacaaatagcacagtaatgaattcctcttcctgaaaattgttcttcttgaggaagaggcagttttcttggtgcagctcctgtagcaattattacagctttaggttggtatacatatgattcagtttctataatcttttcatcatctgatatatatatcttttcaattgaatcaaattcatcaatatttgctccaagatctctagcttgttcttgaaatatgtcagctaaatctcctccacctatacttttaaatcccgggtaattctctatagtataactatttctaacttgacctcccacaagttcattttctaacaacaatgtatccaactttgcccttcctgcatacattgctgctgtaagacctgctggtccaccaccaattataattaaatccaattctttcttttctttactcatatctattttctcctaatatttaatacattttaaactactcaatacccaaatattatattaatctttaaactaaacagactatttcaatgtataaataatttatagcgttgaaatagcccattaacataaattaattcttattgagctccaaattgctttcagccaatcttctgaaaataagtttgttttctaactcacttacctttaccctatctccaattcttatatttccttgtaatatttcctcacttaatttatcttctacctcttttattattaatcttctaagtggccttgcaccataatcaaggtcaattcctttgtttagcaggaaccttttactattatcttcaaagtttaagtatatatctctgtcttcaagcctttttcttattgatgcaagcattaaatctataatttgatttaaatcttcatcactcaacttatggaatactattgtatcatctattctatttaaaaattctggcctaaatttttgctttaattctcctaatatattttccttcatcttttcatattcagtttcattttcgtttttagaactaacactactaaatcctatgcttttttgttttttaatttgatgagccccaacatttgaagtcattataattattgtattcttaaaattaactatttttcctttaccatcagtaagccttccatcttccataatttgaagcaatatattgaatacctctggatttgccttttctatctcatctaaaagaactattgaataaggttttcttctaacagcttctgtaagttgaccaccttcttcatgtcctacatatcctggaggcgatcctattaatctagataccgaatgaccttccatgtattctgacatatcaattcttataatattattttcatcaccaaacatagcttctgcaagtgctttagaaagctcagtctttccaactccagttggtcccaaaaatataaagcttcctattggtctattaggatcctttattccaactcttgcccttctcacagcccttgctatagatttaaccgcctcattttgtccaacaactctcttgtgtagtatttcctctaatcttaataacctttcactttccgattcagttaatttttgaattggaatcttagtccaagatgatactacactcgctatcttttctgcatctacaactagtgtctttatagaattctgagtatcccaactatctttcatattacctaactgctcttttaaaattctctctttatcccttaaattcgcagctctctcaaagtcttgaactcgtatagcttcttccttttctttacctatattttcaattttttcttctaaatcttttaaatccggaggggctgttaaactttggattctcactttagcagctccttcatcaatcaaatcaatggctttgtctggcataaatctatctgttatatacctatctgccaaattaacggccgcttctaaagcttcatctgttatttcaactctgtgatgagcttcatacttatctcttaatcctttaagaatttttagcgtttcttcctttgaaggctctcccactgttacaggttgaaatcttctttctaatgcagaatccttttcaatatactttctatattcatctatagttgtggctcctatacattgaatctctcctcttgctaaagcaggctttaatatattagatgcatcgatagcaccttctgctcctcctgctcctataatagtgtgaatctcatctataaaaataattatatctttatctttaattatttcatccatagttttcttaagtctttcctcaaattcacctctatacttagctcctgcaatcatagatgttaaatctaaagaaacaactcttttatttctaagtatctctggaatatttccctcaactattctctgtgctagtccttcaactacagcagttttaccaacgcctggttccccaatcagacacgggttatttttaattctcctacaaagaatttctaataacctttgagtttcattatcccttccaattacaggatctagtccttgttccttagatagtactgttaaatcccttccatacttatcaagcattggagtattagctttcttattatcaattatatttttatcgctagctttatcttcataagtaccggataagaatacaagtaattcttcacttataatggtaaagttaagattcaagctttttaagatagtgtatgccattccttcttcttggttaagtaaggctaataaaatatgttcagggctaacatatttatgatttaatctttttgctgctgcaaaactttcatctattaaccttttggtacgaggggtaagtaaaatattatcgtctgttttcttgatatccccataacccaagtatctttgtatcatatttctaatattctcactattaaccccatatttttttaataacttagcagaatatccatcttcttttaatatgccaagtaatatatgctcagttccaacatacccatgtttaaatttttctgattcattttcagcttctaaaattactgcttgtgccctttctgttaatttattatattccatatactttaaacctcctatcttctccttaggttaacatttctttcactaatttagctctttcatacttaatttccttatcatctagtgattttttcaaataattttgaagggatgaattagtaattagaataaatagtttatctaacttacccttatcaatatttataattgataattccgctcctaatctaagatttgataatagttcaatagactctttaaaatccaaaatcattgcatatttcagtattccatatgctctatatatcttatcctctaattcatgtctacatttactaagtaatatttctcggaatttattttcctctattattatgctccaaactgcttcttttaatttatttataatattctcctctgtcaaacctaatgacactttattaaatattctgtataaatttccaaaaacttttgtaccatctagatgaactccctttatagcaattcctaacttaccaagccttttggatatattattaatttcttcactcatactaagagctggcaaatgtaatactactgaggccttcattcctgttccgatattctctggtgatgctgttaaataacctaatgtttcatcaaaagcatagtcaaaattttcttctatcttatcatcaataacagttactctctcaaaaatttcttctaatttcaatccatcacttacacattgaagatttatatgatctttttcatttatcataatgctaagatcttcttctttattcaatataaatgagcccttatcagaatttttcaaaagctctttgctgattagatccctttctaaatattgtttactaaattcctcttttgtattccaaatctcatataacgtaatttcttcattatctaattcatttttaagaacgttatatacttctttgccattttctctacccttaatatagtttagtttattaggaaaaggtaaattactaaagtttctagctaacaacactttgctacttaatactgctccaagtccttccttatcatcttcccagctattcatcacaatttccctcctttctatttataatttccttagtgttactttctaatatatataattctagttttttaatttcatctcttactattgctgctctctcatattcctcagctactatcaatttttgcatctcttcttttaaatccttaaggttttttctttgaaccaattcctttccctttaccttaggaatcttaccaatatgtttacttccaacttgtaagctctttatccttggctcaagtacaatattaaattctttataacaatcagtacatcccaatcttcctgatttcttaaattcctgataagttaacccacaatttggacagataatttcctttactttattattatctatatttgatttaccattatctacattagataatatttctgtaagtattccttgaaatggaacatttatattttgcattattggattaaagaacggaatattagctatatcttttgcacaattttcacataaccaaatttcttgtttctgaccattcatcactgtaattaaatttatctttgcttcattttttttacatttttcacataacatatatatccccacctttaagataaaattatcataatcatagcttttaaaatatcagctcttactttatttttattatctgctgaagttaaacttctatcatttattgctattttcattatttcacattctctttcttcaataactccagattctaataagtgattaagcaatgcgtttgcattatgatatgttattgtttctcctatgctttggttaattaattcttctcttctattggagttgtcatcatccaactgcttgatcgctatatgacctccgccgcctctcttgctctcaattaaatatcctctttcataggtaaatcgagttgttaatacatagtttatttgggacggcgcgcatctaaattgatctgctaactcatttctttgtataaaaatcacattatctctattctcattaaacatttgttttataaactcttctattatatctgaaagtcttgccataacatcacctgcttaaacctttatttaattatttgtttttgacttactttgactttataatattatactatacttcttctactttttgaagtatcaatataaatttatgattatttatattactgtatgttaataatatctaatatatttcaatttatggaggttttatatgcaaattatttggtatggacattcttgtttccttatgaaaacatccattggtaaaagaattctaattgatccatttagcaacaatttaggttatgataataatttccctaaatctgatttaattaccattagtcataaccattttgatagttcatatattaatgatataaataatacaaccaagattattaatgagagcggaaactttaacttaagcttccttaatatagaagggtttgactcctttcatgataagtgcaatggactaaaaagaggctcaaatattatttatatatttaaggatgataaactttccatatgccatttaggacatttaggccatataccttgttcattgattttagaaaagcttaaaaatattgatattttacttatccctattggtggacatttcactctcaacggttttgagtctgcgaaactttgtaaccttatttcccccaaatacatagttcctatgcattataaaactaatacaacaactttatacttagacgaccctaagaattttataatatctatgaagagcgtaaaaaaaataaattctaatatattagatacttctgacttgtatataaattctaaccttaagtctgaatgtatcttgttaacacctccatataaatagtgaaaataactatttcaactatttttaaataaaaaaagaccgcctaaagacgatctctcttttattactcttggtttggagctcccactgggcaaacattagcacagtttccgcaatcgatacaagtatctgcatcaataacgaattgagtatctccttgagttatagcactaactggacattctccagcgcatgctccacagctaacacatgaatcattaataacaaatgccatctagaacacctcctaataaattgtggtaattaacctcttacattttaacacgtattcgtatgttttaaaagtgttttgtattctagacttcttattttttaatattgttatatcatttacgattacaaaacaacatatcctaaatcctctatggaatttataatactttcgagttttaaaaagatatcattatatatcactgttatctccctttttgcaagcgaaatttcagtagctattactcccgaattcttaacaactgtatcttgaattatcttggcatcgtcattagactccatattacaaatcttaataacagatttcatagaaattcctcctatttttcattaataagattttttattaatgttttatcttcctctgactcaacaatcaattttatattattttcatcaattgtgtcttcatattttcctgaaacgagctctacatcagttattttgaattcctcaacaacttcctcgtctcctcttctaaccttaacctttaccatctctttaactattgaattaccaacaacttctccattcccagcctctgtcttaacaatagaaccaatcttaggcaatctctttcttataccttcatatgtagtttgctcatagttcaaacagcacatcaatcttccacatattccagatatcttggttggattcaaagaaagattctgttcctttgccatttttattgacacagatgcaaagtctcctaagaatgtagagcagcacataggcctaccacatggtccaagtcctccaaccattttagcctcatctcttactcctatttgtcttaattctattctggttttaaatatagtagctaaatccttaactaattctctaaaatctactctaccatctgctgtaaagtagaatataaccttatgattatcaaatgtatattctacatctattaatttcatatttaatttatgttcttgaattttagctaaacatatatctaatgcttctttttctttatccttattttctttatgttttctaatatcatcctcatcagcaattctaataacattctttaaaggtgatactatatcttcctcttttatctccttaattcctataacgcattcaccaaattctatacctctagctgtctctactattacataattgcccttttttatatccaattctaatggactaaagtagtaaatctttcctgccttcttgaatcttacgcctataacttttatcattaattatacctccgcaaagcccataagcaaaacacttatgaccattgaatagttcgtattactattaaaatttattctagcttcttttatgtattctaacatactatttaatttcttataagatattcctcttgatatattttttatcttatatattttatcaaaattaacaacgagttcactatcattaagttctttaagaagtaagatatctcttatatatgatagaagtatatttagtaactctaatttatcttcttttgcactttttaataattcttcatactttaatataatacctttttgtctacttacgatatcttcaaataattctatacatatatctctcaaatttctcaacttatcatcgctaaaaaatctatctacatttccaggtattccagcactataagctaatgcagcttttttatcatcttcacttaaattattatatttttcctcaaggtaactcaaaatttcttctttatttaatggtgttaacctatatatttggcaacgcgattttattgtatctaaaattacttctaaagaatcacttagtaatattaaatgtacacctcttggtggttcttcaatagtttttaataatgcattttgagcttgaactgttagcttgtcacatttatataatattaatacctttttatcaccttcataaggctttttattgacttcacttataatgcttctcacatcatcaacaccaaatgaattggaattaggagaataccttacaatatcaacactctctacaccatttctctctttaataatctggtttgaaagatacttagctactatactttttcctattccatcattaccaattattagatttgcatgagaaaatgaatccttttgtcttctattatttatattatcgataatatttttatgtccgattatctttctcaatgcttatctctccttgatatcatatttttacgaacttatccacatcaattacgaatacagtagcacctcccacgctaatttgcactgggtattgttgcatatatccactttcacttcccccaagggtagttggtgtaactactgtctcatttcgctttctacatacattcctaataacatcaataacaagttcgactttttcctcttcaattcctaccaataatgtagtattaccagatttaagaaatcctcctgtagttgctaattttgtaactctataatcctcttctgttaaagcctctatgacatctgctgaatcttcatcctgaacaattgcaattatcaatttcattttaattcccacccttaaactaataataatttactacatattattttaccacaaataggtggctttttattacttagtttatatttgtccatattttaggtcttagtatattttttatttgattaattacattttctttcgtattatttgcatctatcttaacaattctatgattattatttttataaacaatatcatatccttctctaactctttcatgaaactctaacttttctatatctaatctatttacttctctgcaatcattattagctattctagccaatcctattttaggatcaagatcaaatagcactgatatatccggcatatactcaccaatagcaaatttatttatacttaaaacttcttctattcctaaatttctcgcataaccctgatacgccaaagaagaatctataaacctatcacaaagaactattacaccttgattcaatgctggtatcactttttctacaaggtgttgtcttctcgccgctgcatataatagtgcttctgttttagcatccatctccttgttatctttgcttaaaataacttgtcttatttgctctgatattttaattccgcctggctccctcgtctttatacattcaaaattattttctgtaatccaatcatatattgcgtcaatcgccgttgtttttccggttccctcgccaccttcaaaaactataaataaaccttttttcatcttaaagtacccctctgtatattagcgtttaaatgtaagaatttaatttctaagcatgttcgctaaataagattatcctaacattatccttataataatcataatctggatcctctacatttgtattaacaattttctcttcacatgctttacaaatcttttctccatttaatattataccatcgcaatcacttgctccacataaaaaacatgatttatttgtatcctccattagtaattcccccttaattttatgattcttataaaattattaccaattatgtagactttatacaccttgtggatgttaataacttctatatagatatttttttaatttatggtaatactaataaagagcaatatatatttacacaattactactgaatttaatacaaattgcataatgtaaatatagcttgcaaaaatagcttatattattaaattttcaaacaataatttgctcataatatttaaaataatagctatattaagcttatatttaatacagctattatcatgttaacaataaaaacattaatatgaaaggagaacttactgtaaaacaaagcaaaacctgtactatatacaagatctagtaatttattttgcaagttttaagtaaggaattgcgcttatgaaaaacaaaattatttcatttttatctacttgtgctgacgatattaaaaatctctgtacctatttatatgagaatcccgaaaaaagttatagtgaagttaacgcgtctaattgcatatgcaatttattaaataaatataaatttgaagttgatagaaattttttaaacattaacaattcatttatagcaaagaaaggccagggtcatcctaaaatatgttatctatgtgaatatgacgctatcgaaaatgaaggtcatattaccgggcataatatggttactgcaatgtcagtatccgctacattagctttaggaagtgttatagatgacatcggaggttctgtaatactggtaggttgccccggtgaatactttggcgggactaaagggacaatggtaaaacaaggactatttgatgacatagatgttgtaatggtagcacaccctgacacatgtacatgtgaaagtggctcttcatcagcaattatcccattaggacttaagtttgaaagcgaaagcaagttaagttttttaaatcggaattcttatacatcattagatgccgttttactaactcttaatattttaaactctataaaaaaaggatttccagataatttagaaataaattcggttatatctaatggtgggtatacaacattgctattaccagcagattctgaaattaaattttgcattcgtgcatctaacacgaaaacttctaacgaagcttatgataaaataagagaaattgcacataatgtgacagcattaatagatattcctaataaatttttcttatatgagtctcctaataaggagttaataaccaatagaacactaaataggctatttagtcataaccttaaagaaagtggaataataaatattaatccaccaaaagatatatatgctggattaagcattggagatgtaagtcataaggttccttgcatacatccatatatatctataatagatgatgaaaatattaaatatggaagcctagatttcgcaaaagcaactacatctgaatttgctttaaaacaatgcaatatagcagctacagctcttgcattaactgctattgacttgatacaaaacgaaactttactctctgaagttaagtctgaattctttaataatagaaattgctaataaaaaaattttaagatatggtatcttaaaaataatataatatatgcttttgataataataaactccatatattatatcgatttatattttaagataccatatttcacttcatagattctggcataataaaaaatcaaacgtaaaatcctttgatgtattttcatattaaacttacagaataataaaaataatagtatattacaagaaatgctatgtgtttacaaaccatcttataatagtataatattagttgtactgcttaggaggtgttataaattgattcaaatctataaaagcgaaagtgaatttgatccttccctaaaattaatagatacgatagaaaatggtgcttggataaatcttattgctccatctgctgaggaactaatattaatatcaaagaaaacaggtgtccctttggaattcttaaaagcagctttagatgatgaagaaacctcacgtatcgatattgaagaggattcattattaataatagtggatataccgtttaccgaaatggaagataactctcttacttatgatacatacccattatcaataatacatactaataaacaattgataactgtatgcttaaaaaacagtaaaatcctaacggattttgctaataacaaaattaaatctttttatacatttaaaaaatcaagatttacattacaaatactaaatagaatatcaacatactatttactttatttgcgtcaaatagataaaaaaagtttaatgattgaaaaaaggcttcataaatctatgaaaaatagagagcttatacaattacattctctggaaaaatcacttgtttatttttcaacttcactaaaggctaatgaaattactttagagaaaatgctgaaattagagcttatgcaaaaatatgaagaagataaagatgttttagaagatgtaattatagaaaataaacaagctatagaaatgactgaaatctatagtaatatattagctagtacaatggacttttttgcttctgtaatatcaaataacttaaatattgtcatgaaagtacttgcatcagttacaattcttatggcaataccgactataataggtggaatatttggtatgaatatagcattaccattatctgcggataatccacatgcattctccatagttatgggcgtaactattggcatttgtggacttgttgcctttatattatataaaaaagatatgtttaactaacatatcttttttataatatcttataactactcttatcccctaagccttagttgtagcatcttgtgtgcagatatccttttggagtttttctactcctttatatgatctaagttcagcttctatatcttcaagtgaacgattacgagtttcaaatactttaaattgaacaaaccaaattgccgcaaaacagattataccataacctataaataaactacctgtaccaaagtaattcaataatgctggaaatgtcaatgataccatcatattagcactccaattaattacactactaaatgaattgcctaagccacgaatatttagtggaaatacttctcctaccataacccacattacaggtccccaagtagctgagaaaaaggcaatgtagatagttaatgcaataacacatataatcgaagcaacagatgaaccattagaaaatttcattgagatgctcataatcaatagcgaaactcccatcccaatagctccataaataagcatttttttacggtcaatcttatccataatggctacagctatagcagtaattattatattaaagactccaattccaatatgggcaagcaaagctgcttgtacaccaaatccgacatctgtaaatatagttggtgcataataaagaactgtattgcatcccataatttgttgaaaaatagctagaccaaagcctataactaatgccgggcgtacaaattcgctaaatagctctttaactccaccacttttaatctcagcttgtttttttatttgagctaattcataattaacagcacttttatcatttttattcatatgttctaatatacttcttgcttcgtctactcgtccatcttttactaaaaatctaggactttctggtaacacaagtgcgcctattaaaagaactgctgctggaatagctgcgaaccctaacatcactctccaaccagtatataaatctgaaaatgcataattcgtaatataagccaataaaattccgctcataaccattagctgaaacaaacttgatatggttccacgtttttcagatggtgatagttcagctaaataagttggaattagagctgaagatgcaccaactgcgacaccaagaatgattctaaatataattaatgaccaaatttctggagcaaatgctgatccaagtgcgccgacaaagaatataacagccgatgtaagaattagctttatacggccatatttatcagacataggaccaatgattgcagccccaagaatagctcctaataatacagaacttacaacccatccttgctgccatgaatcaaggtgcatttgttcttgaataaataaaatagctcctgaaataactccagtatcataaccaaacaaaagcccactaagtgcagcgaaaatatatattacagagttactaatttttattttcattaaaatcatctcccattttttatttcatttgatttaaattcgtatattcctagtgcgtttataatattcctaaaatttcttcgttcggaagactatttttatcgtttacaaaagatacattaattgcctagtatatttataatttgacttccatgaaacttggtaaaaataactagcaaggccaattttctcttacattctttaaataatactgtactagtttttattcatatttatcatatcgataaatataccttctattaataatctaataatgcatgcttatctattagcttttagaaaaataggtacccaatatttattttccttaaatttagtatagcactctttgaaacctttttcaataaactttaaaaagtaatttaaaaagtaatttaaaaatttatttaatatatatttatgataatatcctacctttgcaattatagtaaaccaatttaaccaatgtaataccattaaatatataaattcaatcgctgcaacacatgtcatgtgatatataattcattaattcactctattagtgacccattaacttataatatttctatgaattaattcaattttaaattatagatttccataaagcttattatatacataaaaaatagcctatgcatcaactatttagttaatacataagctatcttaaatacattggaggcgccacccagatttgaactggggaataaaggttttgcagacctctgccttaccacttggctatagcgccattatggtggctcgaactggaatcgaaccagtgacacgaggattttcagtcctctgctctaccgactgagctatcgagccatcttacctcgcaacttcctactctcccacatagtctcccatgcagtaccatcagcgtaatagaccttaactttcctgttcggaatgggaaggagtgttacctctatgccatcatcacgagattttcttttgaaagaaatactgttctttcaaaattgcatataattttaatgtatattacaacttgattatattggtcaagccctcgacctattagtatcagtcagctaaatatgttaccatacttacacctctgacctatcaaccttgtagtcttcaaggggtcttactagcttatgctatgggaaatctcatc

SEQ ID NO: 108 - DNA, 19083 bp, Clostridium beijerinckii
aatttcatgtctatgatttattataaatatcaaatattcatagaacttcctctattcacattaatatattatataatgttagatttcatctatcttaaattaacaaaaaagtaaaatcaactttctgatgtagtctttttaatataaattttttcttccaaacttctcatttaaccaacctgtaattccatttgctagattttcatcaatgtaatataaaaatatctgcttcaattaaatttaaatggtcttcaccttttttagtatattgtaaaaaatcaatatttttatcctatttatctattaccaaattgtaccttgtaaacatatcatccccttttgaatctactttccctctctctttgcagcactttcaacccattgtcataaattttcatagccattatcaatcttatagtcataaactccatcattgtggttatcaaaatatgtaggcgagttgtcattatattgtccaattacagtatgtatattgtattttagtgaaatttgacctgttagaatatccttaatattatgcacatgaacactgatcacagcgtttcctcgtttaatactttcacatatctcatattgaacaaatggtcttttcaatgtattcgttcctaaaagtacaaccgtcacactagtaccttctaactacttataaatccagctatatatatagctttatcacctgttcgtttaagtttttcaaactcagctttatcaataattccagaaatcacctgttcaccgtgcgttacctatctgtttcttacaaccattgttctgttagtatcatcactatagcaaaaactgtaaaacacactacgtgccatcaataatcacctccaactttattcaaatcagaatattctagactttttcaaatgttctactaacccagcgctcccacattgcaacatatgaattatttgtacatgacccaataagattttttgtcaaatcattatttttatttttttgtgatatgtatgctccaataataagcataatattatcataagcaatataacccgaatcaatttttgccagagaataaatttctttttctgtaatattttttgaacagagtcctttcattctatgaaatatctcttgaaataatctttcagattcattcctcctcaaagacaagctatcattattcctaatttccgtttcttgtccaattccgattttatcaatatcacgagcatataaatgtaaactgtcactataatgattatatgaacccaaatctagctcgagccatccagctaaaatttcttgtaatccagtaaattgaataaaattataaggcattcctaatagaacgtcattactacgcattatttgagaccattccagctttccatttctgacttttaataatgaacatatattacatggaatatcttcgtcttgcggtattcctttttctattggaaaatcaaccttagtgtcgtaaatttgtatcactacctgccggctttctggaatgctttgtaatgcttcgtatgccttttctatctgatcaaaaccgaagtgtgatcttatccgcttcccataggcaccatgataaacatcacctctaccagcatacttttccaaacttggattccacatattaataatatcggacctttcttctccattaataatccatactaattcagccaaagcatatccgatgctaattggaggaatacggttatagatccatttttgttgcggttcttcaattgaaataaaagtatgcaataattcaaaaacatcacctgttcttccactcagagaatactcttgtttctgcaataactttatagctttttcccatacttcatttgcagtttttccagaaataaaatcagccatttacaattctccatttctataaatactaatgcgattatttattccccacttaggcgggtaaaagtattcaatactttccatatcacgattaacatattgttgttttattctttttcttccgtttgttgtaccaatatcaggatgagcaattctagcatatttatctgtttcacaaaataaattctgacagtctattaattgtaactttctaccatacaatgtattgaactttaatcctcttttttcaaattccatttcttgttgttctgctacgtacttaatgatatcttcgtatttgtgcccattcaaatctctaaaacatttattaattccattttttgcaccaggtccagctacaacgaaggacatttcatcaaaatcgcataattcgctatagttaatatcaatggcaaattggaatgctaaaaatattcccaatgtaggataattaagcaatcttagatataattcttgtaaactcttgctttctgctatcatactagacaatccagactccatcatatactccaacagtttcagattattttgatgttttttatcaaacccaaaacaacttttccccgatggcattatataagcagcagaataaatcctttcatcattattaatcttttgcgttaataattcattatatctttcataagaataagaacgatatgaaatctctcccaaagcattttccatgtactcccacgtatcgattttattaaatagcttaaaaaataaaattctaaaacattgatctttaggagaatatagattattacaatagatcacattttttattaaatattgacttactcggtcgcaagctctatagacattggtaaacttatacttctgaattattttgtcatctgtccaaggaaaaggcttattttgtattctattaaaaaatacttcttggcgtttttctgcaaacttccagtatgtgtcatatactagtgtcggcttaaaatcttctaacttcataaagacgattctcccataatctcgttaaatatcatgtttgtcgtttcttccaaacttccgtcgttatttattatttggcactttggatcttttcttgcaagatctctatatttttgcataatctgaatatccttatcagcttcataatccttttcacgatccttacgttctattaaaaatattttattgacgttaattttttcccaatatatcaattctggagctaaaatagcactaacaacgttactttttaatcctccagataatccatatgcgtacgtagaccaccaaaagcgatccatcataataatttttgaagtgctatattcttccattaactttcgttgaattaaatctatgtgtgaagcaacatgcaatagttgtaaactagcatcattaatggagtaatcaatatactttttctcattatgatgtatatcataaacaaacgcacctaatgttctttcttcatttcctgggaacgcaactatttcacattcatagcccatttctttgcacagtcttcctttcaattctttaataattgttgtctttccaacattatcaattccttcaaaaacgtatatcctcgagcgcaaagcattgacgttatcttcattcaatctcattctctccttctatagaatctaataaacgttttaccattactctatgattaacattgtaaaacaaactttcatttagtgatgtatcccaagaatttaattcatcccaattactctctgtaatcatttcaaaggcatactcgcttgaacgtccaccaacggttccaaccagtgcaactggtatgcccactgatttagctaattctacttcaatgtcaacaccctgttgtgttttatcttctttaacttttcctccaagacaaattagcatttcacttttttctttacaaatcatagtttcccgcatttcttgtaatccatcagataacaccagtgtacatttttcttgaagttcttcgagattataagctcctaaataagctttgtccatatgcatttcaatagagtatttgatatctgatgcatatacttttccaatatcaaaaataagcttttgaaatgtgggatgcgctccaaaaaccaatatatatccacgcttaattatttctcttgaatagactacaactgcttctaataacgaatttttatatatttcgtcataatccggaaatgctcctgataagataattctcttctctagcctgcgcctcttacctccactaacattttcaatattcattaaataatcatcaaaattttcttctgataattttgcatcacctatttgcttgtcacgtcttccatgattagataatagaaataacctatcatggttttcatatattttttcttttataaccttttccctaaattgctgaatatcttgaggcttgggatttcttccaaaacattgaacataatgattccttattcccaaatcgtacaagtctcttgttttctccttatactgaacctgatatgcaagaattgatgacttatcacttactaattttattttgtttgagttactcatgtcattaaagtattcgatataagagaatacttgatttgatgtattcatcattaactgaaagcacttcacctcaatctcatcaactatttctaatagcctctctctatcaaaaaattcttcactagagtaacttagtactggagcttcacctggacgaattcccatttcagaatatggagcattatcaatttgaatccatagaatcggaatatcattaataattgcgtagcatagttctttcattatgtatgaagaatattgtgattcttttgtctgcaaaaaaatcaccacatcacttaattccaagtttttatcaatatcttcttgtgcatcatttccaacttctacattaacaacgtcacgataaacatttctttctcttgttaaacttttcaattcatctgctagctttgctgcaatattctctccgtcaattcttctatgactaataaaatatagaacctcatctctatacagtggtgaaagtgtctgtgaaataatttttcttgcaaaaatttgagcaattgccttcatattattcttcattggatttctattttcatttcgacaatagacatcaaaactttgtttagctgataccggacttggtggacatctacattctgcattattttccattgcgattggccatattctactttgagcgtcataatatttgttaactagtttactaattccttcatcataaataccattctctgaattgaaaaatatcaaaatatcatttttgtctggttcttctgtcaacaattgattgatctgaaaaacagatgaaatatataatttattagccacataagtatctaatatctccttgcattctgaataaaaaatacctgctgattctaaatttctcatggtcaactctggcttacaaaaaatcatcctcataataatttaccccctataatgtgcaaactgcccacttttcctgctataaggaaccccatgtattcccgtttcaaaattttcattcatgaaatttataaatttatgaattattttttcatcacgaaagctcttgtgattacgcccactaccaattaacactccaaattcttttggaatttcaatagcattattcccaaaataataaaactgtgtcgcaactagaactctatctgcttgagtatcacgatttaaatttaaataattaatgctaccatctgccatactatgatgtgaaagttcttgtgtccacttttcgccaatatgatgatatatattatctccgtacatacaagatatagatcgattaaatactggtctcttttttacaaatctcttatcattccagtattgatcaaacgttaaaatctcatctacattcattagtacaactaattttttgtgcacttctgtcctagcacctccatatgcagcaatccaatctcctactcgggcactcttccgaattcttggcttacatgttgccaatgtacaatatccaaaataaggatttggtgcaaagccatagtctctaggaataacataagaataatatttcatatatgcacctcaacactgatatctcggtaaatccattggattgttacttctagggctaccatcaggattttcccattcaaaatcttctccatttatcgcatctacaattttttcaccattccatccgactaagttatttccattttcaattaattctacaggaatatcttcctcttttgctccttgtaaatacactcctacaattctttttcccatttctgcagctgtctttatttcccaattcacataatcacttttagctgtatctttacctatcagtacaactactgttcctgcccatttcatttgcggttttatcaattcttgtttgatatactgctcattagttgcattgttttttagtttattttcataaatagaactgtctctcatatcaatcccatgtttacctattaatttcttaaatgactcaattttgtctgcatcattatgttgatgtgacacaaaaatattttttatttcatctgccatttttgtccctcctataaatattaattgcattttccaagattacttttagttattactgctctcatgaccgattccataatctactgttccaactactgttgcactaatgaataatattttcaaatccatatatccgaagtaagtgcgcagaagtcaacactaaagaacaagtttctagttttttcaaatgaattaagaaagcttttgaaaaatatatacaaacacaacacttcattttccacgccaactactaaattactatatttatttcaatattagtttcagtatctaaaatttcaaattcagcaggtgagtctgaaattccacttccagtgaaatcttcaaatctatatatcttaccctttgacatttctaaagatatagccgtctttaagtattgttgacctatttgcaaccattttttctttatctaaagaatcaataaattcattactcttccttcccctcttatcacgaagaaattaatattttacgactaaaaatcatacttttttacaactctactttttattatactaacctaatattgtaattttcttttactacattttaccacattttattgtatttgttgatataaaatggaaaaattaattcttatttccttatttgcttgattttcaaagggcatttttacttttattcgacactataaaagcgttgtattaattttattaatgtagtattcaaactcacttgctttttacatgtggattatcaaatttgtcttttttcaagttatcaaaatttatatcctcatcagctaagcattttgataactcgttatagtcatccttatatgttttgtaaacattgaaaaccagttcaattattgaattaccaacattactttgctctagttctttataatcaaatttttgataaaactcatatatttttctctcaatttcttggattaatatttttcttaactataagtaagcgattttgacacgagatacccagaaaaattaagagatattaataatccagctatgttaatctaaaaaactcattaaaatgctctgcaattagagttccaatttctcttatacaattactctcatccaacctatcaataactccacatccaacattaccactcgcagtatgacctacagctattataaaattaatcattttccatatctcctccataatctctaatttttttactttttaatatgagttatacgcctttaaaaacaacagttctatgctgcaagcaagagcttcagtattaaaagcataagtaacaacataaatctaatttatttttatactcctatataagttatatgtaatctagccatatatagatgtaaatttaatgcaaaacacaatatatgtaaaataatcactttaattcacaactcttatattgaagatggaggtttatatggattttaattatattgaagttttagttaccaagtgcaaaaataatgatgaagaagcaaaagaaaaattagctgaagaatttaggactttaatttataatatttctaaaagaactttcattgatggatataacgcacatgatattatgcaggagtgttaccaatcactttttaaatctgtttacatgtacaatttagaaaagcatagattcgttgcctatgctactaatgccattaaaaataatatgagtgatttaatcaaaagaattaaaactagaagatctactgaaggtaatgatgcattaagtctacatgataattttgaaagtaatcttccttcagaagaaatctcaactgaaacttcattatgtgaaatgtgtgattatgaagatttaaaattagcccttaagaatttaggtggagaggaacttgaacttatagattttgtattctacaaaaattacactgtaaaggaatatgcttattttaaaaatatgtgttactctactgctattcaaaaaaagaaaaacattttaatgaaaatccttaataatatttcattgtattattaaagagaaacatctaacatctctaaggttaatccttggagctgttatctttatataatacaaatatttcatttacctattcaaaactaaaattgttaacaacctatgtagttttttctacataactatcagcaactttatctattccattataaatatattttaattgtccaagtcctttagggcttcagactgctgataaagtgttagcagtctttagttttctatatttatgcaatataatatagtattttacgcaattgaaaaaaggacttatgagtgtaaaaaatctgtattttgattcaacacttataaaggctaatcttaataagcgtaaactagaaaaagttgaggttaatgtaactcctagcaaattaatccctcctaaaataaaaataaatagactcctactatattttactatagtaggagtcatcaatctcaaacaagatatttaaaggcgaacttcatcacctatgaacttttatattctcaatacattataattttatttagttgtaccttaaattctaatatatttcaacttatatcaatctaatttcgtaatattttttccttctctttattttattcaacgctttatatttcagtaattactggcaaaaccataggttttcttttcatttttgtatatacataagtatttacttctcttcttatggcactcttaatttctgaccacccagttacatcattatccaggcatctttctacactcttagaaactattcttctaatctctctcattagctcttctgaatctctaacatatacaaagcctcttgtaattatatctggaccagatattacggttttactttctttatttatagcaataactactgttataataccatcctttgctaaattctttctatctcgaagtacaatatttcctatatcacctacacctaagccatctataagaaccctacctgctggtaccttgttagttatttctgctttatttctagctaattctaatacatctcctatttctaatataaaaatatttgatttatccatacccatattttctgcaattttagaatgacttaataaatgcctatattcaccatgtacaggtacaaagaatttaggttttaaaagtgcatgaattaatctaagctcttgctcacaagcatggcctgaaacatgtatatcctctattgcttcgtatattaccttagcacctttttctgttaaatcatccacaacacacgatacagcctttttattacctggtattggtgttgatgatatgataaccgtatctcccttttctagttgaatactcctatgattgcctgctgctattcttgtaagtgctgccattggctcaccttggcttccagtcgtgattattgtaactttattatctggatattttttaacgtcatttaaatctattatcatttcttctggtataaataaatatcctagtgacatagcaacttcagatattttttccatacttcttccactaaatgcaatcttcctaccattttttatagaagcattagcaatctgctgcactctatgaatacttgatgcgaaagtagctactattactcttccatctgccttaataaatagattatttaaagtttcacctacagtcttttccgacattgtataacctgaacgagtagcattagtactatcagccattaaaagcagtactcctttttttccgagctgtgcatatctttgcaaatctataatttctccatcaattggagtaaagtcaattttaaaatcaccagtatgaacaattattcctataggtgtatgcaaagcaattgacacactatctgctatactatgatttgttctaataaattcaatattgaaattgcctgtttctattatatcacctggtttaaccatatttaatgtgcaatcactaagaatattatgctcttctaatttactttcaattaatcctaaagttaactttgtagcataaataggaacattaatttgcttcaaaacataaggtaatccacctatatgatcttcatgtccatgagttataaaaaatccctttatcttatccttatttcttagtaaatacgttatatcaggaagtacaaggtcgattccaagaagttcttcatccggaaacgacattccacaatctataattactatctcatcttcatattcaaagacagttaaattttttcctatttcccctaaccctcctagaggtataatctttactttgctttttattttgcttttatttatcattttatctcctaacttgtaactaagtgcataaatatattctaagattcaattgaagttcttctaatagaaatacaacttcacttacttgtatcttagaagaatctgtccacttaagtggcacaatattccttcaagatgaagcttgtatacgcaaagatacaatgaacttttgagtacaaaaatagaacttaattatcattaaatttattgatattaattttttatgttataaatttttcataattccgaagagcaatatatactgttaaaagctttaacttttataaaagttattttgtctaagcatttaattaataataattaattttgcaaagattaaaaacatcttacagtatctgcgccttaatatttttatgtaatattttgattatcataaaaaaacttgaataaatacaaatttaataacttatattcattcatctttttttattattaaattataacgaactttacacttcttactaaatattatcattaatattcctatatagtcaatttatatttatgctatcattcaattctaatctgaatctaagatgaataaggtttacttattcatctttaatattaaagattttatctctatttcaaaatgatttatacactttttctatatatttcaccgcattttctaatcctttttcagactcaataatatttttgatttctttagcatttcttatatattctttattttccatgtccttaaatacctttattaaatcaactgattctagatttttctcttttaaagtacctactgaatacccttttgaaaacaatctatgtgccctgaatggctgatccgctgtaaatggaattattaactgaggtaccccgcttaaaactctatccttccaactcttcacttctttaaatagaaacggactaattggatatactactggaatatcttttccgtttacttgaaatgaaagctctccagcctttctcttttttaaatgaagtgattcacttctaaaatctttaatttcttttatttcttattcaaaactaaaattgttaacaacctctgtagttttctctacataactatcagcaagctgatctattccatcacaaatatatttcaagctacatccttggcatttatccaatataccatcatctaataaagaacatccaagttcatcattaaaagtagaatttctaatagcaagagcaatctgcttttttatcaaaaatctctccttcttctgaattaagtttaatttcatctctaatcatttttacaacacactccaataatttatttacagctttaaaatttatgagctgctattatggatatatgttttatactgtaacataacattaaaatcatgattaaatttgtatatctaatctcctaacccgcattttacaagcaaattcttatattcttaagttctaatattcttaaattccatcattcttaagttcttttattctaaaattctaaaaaatatatattcctaaattctttagaattttagaatctctaataaataaccatatatcttttatgaggatacataaaaatactgctaaggagggtatataatttatggctagaagaaaaacatcaaacgttcctaaaaatgattttgaatatgatgaaggtgaagtatatggatttactagcgaagttcctatggctggtgactgcatatcttccttctcttttgatgatgattctgatattaatattattcaaaatagctctgatactaaatctaataatacttctattcaagaagatcccaaaaacaatactcaagttaatacttcttcgactagcagcagcaatattgaatataatacaaccaactctactaattctatggagctaaaaaatactttaatccctacacaagacatctttgacaataggaaaactccactacctaatggtgccactcccgccattgatggtgagactccaaatattaaaagaagctacacccttagaagttctactataagaaaaataaatgaattaaagagcatccatccagatattaatgtatgtgtcagtacaatagttgatattgctatagaacattatcacaaccatattgtaaatgatggtggcactcaataattaaatttattttatctattttaatttcaaataattatttattacctatatatgaactaatatattttatttcatatatcctttataggaggtgatgagtttatggaagtaaatcaattaatggatcttattgttaataatggctttcccgtggcagtgtctgcatatttgctaatacgcttagagaagcaaattgttagcttagcaagttcaattaataagttaaataccataatatcagctaaacttggagtggctatcgatacagagagttctactgatgattctcataaagtggcatgagtaaaaaggcgataaacattgattattagtgtttatcgcctttaaatttatttgtattagaacaccgaaactaagtagtttaatttgaatttaaattataaaatgatacacaaattaagaatattatgtattacttgctcatttctttcttatatatttttatatattctcctgaatattcaacaccatcttcaatatattcccatccagtcttttcataatagtcacaaatatcggtataaagaaatagttctgtaaaacctacttctctgcaatactcaaccaaaaaattctgtaattcttgcccaatcctttttcctctgaaattttttttaacaaacaatgctgataaccaaggaaaaaggtcttgtctactcattaaatcacttctccacaagccgatagttccaactaattcattatcttcaagtgcaataaatgttaatggaagtctattttttattaaactgttttttattatactttcaaaaaaattataattattttcgtttccaaattccttccaaatccaatttatcacagtatcaatgtattctttatggtctgctaaatgttctataattagcatattaaatcatcctctctcttggtattaatttactatggagaaatattaaaaaaacaccttaaattcatttcttgctttcttcaagtgtatctaaaataatatccaatttttcattcatttgtttatttctttttataaaacttttaaatgcatttacccctttatatattcctattattatcaaaattattaccccaaaattgatccaattcataattagagtcatataattaatttgcataagctttctcctaaccacataaattgtttacttttaatataattttttataagcctagagcttttaactacttaatatcgctttatataattattattatattacaaatgcatttatttacaagttttcatattattgtatcaatattattatgtaacaaattaaaataatataaggagttaagatggacagaacaaagctattacagttattaaacaattttaaatttagctatagcttcattcagtccatcttttgtaatccaataacgtcgcttcgctcctaaggaagagaagttcaagctagtttatagattctactgtttttagtacctatatattatgggggtatagtctaaacatttataatctctatatattttgaacttctcattaattgttgtagcctgcggcagcaaggaataaatatattggagcactacgttctccttgtggctgcgccactctattagtttagttttatttctacgtgcttaatttaaattatctttatataccactaactagtttctaattaattatactttatctatggtctttatgttatagctattattggtatagctatatacgcattttctaaaggacaagtttatttgctttagagttctttgtgtgccatatccaccacccaaaaatggacaggtcatatagctacaggcttctaacattgtaaaagtctcctcatcactcggaaccttttacaaagtaagaatctgtacgcattagactagtcctttatttaggttcccggtggggcacttcgggatgaagattttcatgaataaattataatcatgtaaatatgcagttaaattccttcttcaaaatatgtataagaatacttatccatccctctgactggaacttttgtttatgttttttttttaggttcattataatttattttttctggtatatgaaatggtaaatataatgtttagttggtcagacaagctgacaataatttttgggggcttagacatgccatcacaattatataagaaagtattagtaatgtgacggcatgcctatcttgtacgggcttaagttcattactataatgtttgattatatgatttttccgctctaaaaatccaatcactaaaaataataaattgtattacatggaaattatttttaatgatacgattttcagatctattatctactttcaattactcataggtactaaaaaagccagtccaagaccgcccccattgaaaaactctagaccataccttttatatagtttttttcatataacatggtacatttatttaaaatgtagctcaagacacgcttcgcttttggtcttgacctgccttttaaataaataggtaaagttaatatgaaaaatctatgtgatattataccgcttgattggacatgctgtttttaatttatcggttgaacctttaagaatatagcttatattattttctttaatcataggttcctagtgctaagtgcttgtccttattatctctttatatataggggatttctccccttatgtatttagtatgacagctcctcgcatgataaactttctaatatattttcatgttctgcatttacttgtttataatattcttccctggctttttctatatcttcatttctttcagcttcataatctacaaaactgttaccctcaattttgcctctaaatgacttccaaaattcataatcatcacttgtaacactgaatattccttttcttgctatattcttgttataacttaatttcaatccataaagacttaatggtgcgccttcatactcaataattattgatccattctttagtctatacgctgtttcagaaaatctgaattctttattttcgcttaaatatctgtactctgctattaatgtttttgattcatattttctcttttccacttttatggccaccttttctttttagttcctctcctaccatatttttattatgcccacttacataaattttagacattatttatgtacaaaaaagcaccttttcaggtactttcattatttataatttattctccaatacatagtttcatataccctcttatcgctttactaacatcttttccattcctatgacaatacgcctcaaagtcttcatataacttgatttcacattccacatgaagttgctttgttggtggtttttctttttttattctatttctattttccattattattccactccttatctgtaaaatattctagccaacaatcaaatttcttatacttaaatagttaaaaaatatatacaaataagtacaaacgcatacgaatatttgttcgcgtaattggcaataattataatataaggttaagagaggatttgaaaaaatatgagaaacttcacatttacaaaatggcttactactaaagaagcttttaattcctacggacactataaagaatggctttctattttatcaaaagaagaatctaaaagaactgatttatattatcacgaaaaatatcaatactttataaattacctacagactgaatgggattagagaaatacgcatctctatccccttctaaaagtttctatatgaaaggattaaatctaatgacatttgcaacatggcttataaaagaaaaaggctttgtatcaaaagctcaatttgattcacttgtaaatacactaccatatgagggcagaagaaagttaatcatatactataaaatagaatatgaacattatcttgatacaagaccaatgcagcttgaaattgaaataaaataatcctggagaggtcctctccaggattattttatttcttttaatattccacaaactacagaattaactgctaaaattataggacaagcttatgttgtttttttagcaaatacttaagctccatagaaaataaatattgtacaggggtgagcgcagcgaatttcccctttacaatatttattttctattggtataattgctctcccaaaaaacattattttagataagttccattactataatcttaaaatccaacttttctttattcaacgctatatccatttattgaaattatttttattaatggagcttgtttaaaatttcctttttggcacttccatataccataaattatctagctctatagagaacaaagtggctgcgcatgctcattcctaatcatatttttataagccaacagcctcttaactattgatataattggttttaaagacacaaaatccatagatattaaaaaaacacccgaaggtgctcttactcatatatctcaaaaatattatctactaattctgttcctgtccctgtcaaataaataatctcaataataacaaacactaaatctaaataattaccatctgaatacccttcttcgcaatgagcaactttgttccgcattttctcatagtcatatagcttattatacaaataaccatatttctcaaaatctacaacacattcgtgtattacatctttaaatttctcatctataattcgcctattcatattttgatatctttcaattttatcatagtatttatcaaatacttcagcatttcctattcttggcagtaagttataatacgcagtttctagatttgcatatagcatttctatatattggtctagtgccgcaaaagcagaaaaaaaagccaatctttcatttccaatgttgtacataacataacttgtaagcaaatattctacccacatgggataatcattgtctattggtaatccatatgcattgcactctaatgttcgttctgaaaactcaataatagtccaaccatctatattgggtacataatcaaagtcacatttaaaaaagattccaggtgcaaaatgatctattgtaataatatcgcctatcatattacattctctcgcaatatttacaggctcatcaatagaatcgggttgtattactatttcaaaatcttcaactgaagaaagcaatttcaaattttcaacttcaagataatcactaaaagaagcactgtatgcttctttaggcaactttactccagcaaatgaaatttcaagttttaacttggtttgctctattccaaagattttatacaaaaagcaatgctcttcacaatcatagatctctctgattaatgaagataaattttttttcctcaaattgtgattccatacatattcttttacttttgaacctcctgacttattcttttccatcctctttcttaccttataaacattagtcttaagaaatggaaccttatttgcatttctgtatcccaaatccgctctagcttcatcttgtaattgttctaatgtacaaatacctttcaatctaatcttcccccaactcttccaataataaaacatgctataactgtacaattactctaattttttcttcaatatttatttttttattgtataacttaatattttcaattgcaactttgtagttatcatattgctttacttacatatataaaaattatacattgatttaactttattataataaaaaaagaatgatctattattgtgaatagaccattctgaatactggttaatatttatttaataagggataaataatgtttaactactttgtgtttatatattgcaagagatttgtgacagcaatatggcaaaattgaactttcttgacctggtgttatacttataatctttccaacagatcataactcaatgtcctaaacacctgacaatatttttgaaatccatcttgtccaataatataaatattaggcatataatccattcttacttttgaatacataatacgctccaaaccattatctatagctgtatgattacttaaagccacatctacttttttactaattgcttcactaataaaataatctaaggacttaagatattgttgtacttcatcttttgtccatggtggagttgtagccccccataatgctgccatgtggatttcaccatcatcttttacagggaatatatagcttaatcctcctggagtatgaccaggagtaccataaacatatattgttttatcacccaatattatggtatcaccatcttgaacataaacatcaatttta

SEQ ID NO: 109 - DNA, 19076 bp, Clostridium beijerinckii
atttagtatagatatgatgaaatttactgctttcgttcatattaagaacttgttcatttttaatttctatatattactcaataaatttacataataattaaatatatacataggttatatcatatttattaattaattattttaggaggctcactttatatatgattattggaataattgctgctatggcagaagaattagaactattactaaatgatttaactattgaagaaaaaaaagataaggctaatatgactttccacaaaggaaaattatatggaaaagatgttgtagctgtagtttgcggtatcggtaaagttaattcagctatttgcactcaaatattagcatctgaatacaaagtagataaaattattaacgtaggagttgctggtggaataggaaaagaaatttatcctggtgatattgttgttgctgaaaatttagttcaacatgacatggatactacagctttcggagataaggttgggcagattccaagactcgatacatttgactttaaatgtgataaagaaatggtttctatagctaagaatgcatgcgagaaaattgcagaattaaatagttttacaggaagaatcgtttctggtgaccaattcatagcaaatatagaaaaaattcattggcttgatcaggagtttggagcaatatcttgtgaaatggaaggcgctagtatagctcaagtttgctatctaaacgcaattccttttgtagttataagatctatttctgataacgcaaataatggtgctcatatggattatgagaaatttgtaccgatcgcagttaaaaattctactagaataataaaacaaatgttagaaatgatgtagtaaaaataatatcttatatagggaaagtcgtcttttataagtgtctaaatatatttatatacacttataaaagacggctttctttatattaatgtcttcctatttaaaatactattctacagtaaacctctttaattcctcttgcaatttatatgatatttgttgcaaattgccagcatactctgttaattctgccattgttgcatttacttcctgagctgatgctgtaacctcttcagatattgatgccgattcctctgaaaccgctgctatattttcaatttgcgtcttaacttcttctttatttaatttcattttttcatttaagaccttaatattttctattgcgcctgttaaaggaattatagaatcaactatttcattaaatataccttctgttttctttattgcctctccttgtttttgtgacatttctctactttctttcatggctattttggtagaatcgctcttattatttatttctgaaacaattgcttttatttcatctgtagatttttttgattcttctgctagttttctgatttcttctgcaaccaccgcaaagccttttcccgcatctccagctcttgcagcttctatacttgcatttaaagctaaaagattagtttgttcagttattcctgctattacatccgatatataatttattttatttatactttctcccatttcatgaaccatgccgccagacttaattgcattttctttagacttttcagctttaaatatcaagtcattaagtatagataatccttgagtacctaatttctcagcttcaccagctaactcattaatatgattagtctctccatcaacttcatctatcctatttgataattcttcagtactcgttgcaacctctgttgctgattgcgcttgatttgtagctccatttgcaacttcttgtattgcatttgaaacttctgatactgatgcagttgtttcctcagacatactagatatatttcctgatgcctccaataaatcagatgatgtattttgaattcctttcaataacttcgagatattctctaccataaaattaaagttatctccaagttcagcgaattcatctttagccgttacaattattcttttactgaagtctccttcagctactgtactaaacgcttcttttaatttatgtatttctttcacaatatacgatgctgaaatcattgatataattattcctataattacacataataaattagcagtaataactgttaccttcattgttaaaacattatttgttacttctttgccatcaattatacctaccattttccaccctgttaaagcatctgtttcttgacaggcataaaatgctttcccattattttcccaattatatactcctctttcttcatttttagctgattcccaaaatggtaatttactaatattatcatctatctctttattattattgttatttgctactacatctccatcattatcaactagtactatgaatcccgtattcagtagttttatgttactaatatattcttgcatggaatctaaagacatatctattactattaccccggtgatttgtccattattatctttaacagcttgagcaactgtcattacttgctttcctgttacgctatctttatatggttttatgtatacaacctttccatcagcttccttagctttcttataccattccctttctttataattgaaatcattaatactcatcgttccgctatctaatacaagctctccatattcagttgcatatcctgcattaataattccatttattgaatccttagtatctttaaacataccttgtacatatttagatattagtgcatgatctacttgcggatttgataaatctttgatatcggcatttttcgatattactctcaattgagtattcaaaatttctagatattgcgaaaaacctttatcaacttctttaatagtttgaacacttgtagtcttcaaattattctccaaaacaacatcagacttaaaaattgctactaatccaacagttacagttgggagtagaagcataatgataattccaatcactatctttctaaacagcttactattcctattcatttcattaacactcctataaactttatctttctctagaattaactacattaatatacataatactacaaatagtaaatataaacacaacttatctgtaataatataacttaataggttaaatataatattttcatgataacattgtattttactatattcaagtagtcgaaaataagctaattgaatatccttgattttaatattcacttttacttgcaaagataaatgttaatctaatttaatatttaatttagcctaattattttattatcataaataattaggctgtattacaaagatctttaattttttatcaataaaatagagtcatcttatactgggaacccaatctaagataactctatttttactatataatattaattcctatttccaagagatatttgcatctcttcttggaacagttctaacatatttcacattaggatatccaacaaccatacatgttacaatttcttctttaccttttaaaccaagtaagtctcttatttcatcatttccctgtgctgccattgtaaagaatccactaaaaaatgttccaaggcctaaagcattagtcataagctccatattagatgacgctaaagaagcatttacagtcgagtctgaaactgcaagaattaacgcaggtgcattaaaaaataatttatcattcttcttagaatcctctttatagtcattatacattttaatccacatttgtgcatatctcttgaaaggtaaagtttgtggatttagatttttaagtatttcttcccctctagtttttaagttttttaaagccaattccttcaataattcaatattatcttccacaactacatatgaaacattttgactattagttccagtttgagtgaatctaccagcctcaataatttttaatatcttttctttttctacttctttatctttaaattgtcttgtagttctcctaaatttaataaaattaagaagtttctccgattctatcttaaactcagactcattataatcttttacatcttccatattatattcatctgtagatactgctcctttagggcaaactgcaatacagtgtccacacttcatacatctaacatttttgatttctgccttgtttccatttatctcaatatcattaggaaaacaatctttaacacaaagtccacatcccacacacttttctttatctacaatcatcatagtataattactccttttatattaaatttatctattattatttttaagtatccacaatatatttatataaatttgcctacctatttcatcttagacatattacaattgactaattcattaactaaattctcaattgctttttctctatcctcttttttatagaaatcaaatcccatttcattctttatattttctgcctttaagaatatgtaatttaaatatcctgcaattaagtagttcttaacccaaaatttatgcgtgtcatctccataaagttccctaaggcacttattgtattcctcttctgaccctagtaaatgtgctgtcatctgattattctctaagtcatctaaaatcgcaatcttagaaatttcagaattatctgcaataaagtttgcaacttcttttaatatgaaggtgagtctataaattgatgattcattactctttgatttcattttctcacttaaagatctcgttgcacaactcataaccttttttactgctagacgaattaaattatctttactctggaaatgatagtttaccattccattaccaagtcctgccttctcggtaatatcttttacggtaatttcactaggctttttgccttcacatatcatatgtatagtaacatctatcaacttttctttagcatcattttctcccatgttttcacctcctattattatagactctgcatattgaacaccatactgtataacatacagtatactattcaataactatttgtcaagctaatgaactttgataaataaaaatcaccgcaaaaatgcagtgatttttttattgatattcataagttctcaagagttaattttaagactttaactttgaaattaacatatttactttcattacataaatcttcttgatagagatactacaaagctcgatgtaaaaaacactcccaagaatgactctaaactaacagccatcttcatccagtttagcgggattatatcaccatatccaacggttgtaaatgttattattgtaaaatataatgtattaccaaacttactaattaaaaaattagcatcaaaattcgaattcttaagcatttcaaatactgttatgaataaattttttgaattcaattgaacatccttacacatcagcaaattaggaaagaaacagtatagtagaaaaaatgaaacaatcactactaccatagacaataatgttctctcccaacttgtatagtactttgtagttatgccaattaaataatacagcaaattaaaattacctttatttttactttttctctctaatctctcatacttcttaaaataataaagcgtttcaaggtattgatctatccttccactagatttatatatatctgatacgatcaaaaagttccattttgttttcttaaagtcattgtcaaaaattagaggcttgtactttttgttttccaatagttcatattccagataacatttatctgagaaattagttttatacagactaaacttacctttaatatcatcaaaattaatttctgattttttataaaaagaacactgcaaaaaacttaattccccatttatatctaactccaacttgcttaatccttcaaatctacaatcaacaaagcataattccttttctcctttaattttgtcaaggataaaatcattcagtatgttaacttcttggaaaagcaaattttctttaaatatagatgcatttccatagaattttccaacctcagaattctccactattatgctttctttaaccacagtttcacttattcttaacttatcacagtttatgaaccttacaaacatgttatttcttattatgcaattattgatttttattcttttataatctccccctaataattctatatcctcaacaaattcacaattattaagtatcagtcgtaaatgactatccattttgagattagaatagctatcaaatctaaatttctttaaaaatatagtattataaaattctcctaaaatattattacattcaaatgtcactaataagccacttctattttctgtatgacctttatggtcattaagatattccaatagctctttctctgtaaaaatgactctatattccaatataactccatctttatcaatcaatataaaatcatctttttctttaatatctttttctagctctaattcatcaaagcctttagttaatatttctttattcattatctacctcatcctaaagtatatataacttttattttattatatattatttaccacccagcttccataataatgcgaattgataaaaattaatatatcacttaatttttatttttgaatatattaataaagatataaagaatatattcaggagtagaaaatgctatcaaagcaagagtttattaaccaatctttagaattaaacttattctttctaagaattatgcgggaacactcgatatttattgaagcagccctaccaccaaagaacaaagatcttataagtcaagctgatgcctttaaaaatgagtttacaactttactctctcgtgccatattactatcagatggagttatccctttcgaaacattagattccaatgaaataagcacaaaatatacaatggatgctgaaaaggctactcaatttgctactggaatttttatagactctaatataacttctatggaaaagtcattaatatctggcatgagaaatagtgatacatctatgttaaccgataatgtatatatgcttaaccaccagtctatagctgcaactaatatgattattaaatttaaaacaaaacttagaaatgatgttctatcttgtaagatatttacgactttataccctgcagttctaaaccatgtgcttagtgaagcaataatatttacagagcttctaacacgattgcaaagtggtgtcggaattggtactaagagagatatactaatacttgaaaacttttgggatgataagttagcagaacattcatttactattagaggaatgctagatcctaccgaagtagaattattcaatatagctaataatttcggaaaagaattcgtggcattgagagatgaggcttctgatatggataaatcagcagaagatttgtctgaacttaccgagactaccttaagtgcagccactaatctcagaaatttcaaagcccagagtactgaagggcttttaacttgtaaaattaaatcaataattctaccactctttgctgatcatgttcttagagaatcaaatcactatataaacttattaaaatccttcagcaacatttaaattcatttaatttgaagtaatttataactcaaaatagacaagacagttaaattaattccgtctaaatatatctctcgattgattagtagaacatatctttatcaatcaaatataaaagtggcataagtattaaatatttatgttgttgttcacacattataaacaaagttatcaacagaatctgttgataactttgtttataatgtggatctttttattattaataaattttcttttcattatagtttttattctataatcaaattagtcttgattttttttcaattatacttataattaattgttgtagcaactatttgtaaaacaattatatttacaacaactttatttactggaggtaattatatgtttgaatcctatgatcaagatattggaatgttgacaaataaagtttctaaaaaattaacatcttatctaaataataaattagaaaaatttaatattacaaccgagcaatggacagtactattaaaactctctaaaaagaataaaataagtcagaaacttttagctgaagtttcaggcaaagaccagtccactttagctagaatacttgatatacttgaaagaaaggcttttattgaaagacatccaagcaaagaggatagacgttcctttgaaatccatataacagatagcggtttaaatattattggagaggtttctccttttttagaagatttatttaataaattacttaaagacatatctcttgaaaaactggaagtatataatgcagttcttttaaaaattgataaaaatataaatagtttataatacaaaaggaggaatcaatgtggaaataaaaaatcattttaattcatcaaaactttggaccaaaaattatatatttatgctactttcaaatttatttatatacttagctttttatatgttaactccaactcttcctgcatatgccaagctatgtggcggtaataatttagaagccagcctagttgtaagtacattttcaataacttctttacttgttagattattcataggcaatattatggataggatcgaaatcaaacctctactgcttttaggcgctctaatacttgctggaagcacactatcatatatctggcttccaatagatgcaataatattggttcgcgtcattcaaggcataggttggggacttgcttctactggtgctgctgcaattttttctaatattgtgccaaaagagaaacgcggtgagggcatgggctactattctctttcaatgataatatccatggcattatctcctatggttgcaatagtaataatgaatttatacagttttaaaaatattgttcttatttcaataactttagtaggtattggtattatatttctcagtcaagttaaatcaactataaaaatctcttcaacatctaatacgatttccaaatgctcattaaaagattcctttgaaaaaaaagcagccttgccttctttattatgcttttttcttgtaatcacattatgtggaattatgagttatataatgttatacgggcaggagctaaaaatatcctctatttggatttattttattggatttgttgcaatgattttaataacacggcctcttgttggaaaaatatttgatgaaaaaggacatgctgtagtaatattacccggctcaatttgcttaataataggtcttataactctctcctatgcaaactctattttaatgcttatactctcctccttattctacggacttgggtatggtgccgttcagccttctcttcaagcttgggctgtaaaccgatctccttctaataggcagggagctgctaacggaactttcttatcttccatggatttatcctatacacttggatcaattcttctaagtttcattgctgagcataaaagttatgcaattatgtatagattttctgctatttttataattttgcttttattgatatactcctattatgtttttatagataattctgaagaaccagaaattatagaagagaaactttcctaaattaaagggttgttgcattagtggaattccactttgctaacatccttcagttcctttatcaattctaattttctatctattaaattctgaatccttttatctcatttaaagtctgtataaatctatccacaaaacattcctttttactttagatatatccacattaatcacagtttttttataataagttttgcagaaaactaaacaggaaaaaggacataggaaaaggaataagattattttaacgtgacacctatataaatatactaggctgaaaccttgatgtttcctataaatatttacatatgtttatatttttctatttaaatatttacatttttaaatagttttctataaacgtagattcctttttaaatatattcctataaatatatttatctttatacatatgtttatagaaaaatattaaaatatatttatttttcattaaatagaaactgaacacaactttatttttaagcaaaaaaagagcataaattcgaattaagaaaaccgacccgaagggtatgttctactcgcttttatgctctatcttttattctattttgagttctcttttttactgctccgccacgtagtcaatcttttttatttcttagttaatctttttttgacggggacaactattttaattcatgaataaataatccacttcttaatttaggctcaaaccatgttgattttggtggcattacctctccaatatcagcaacatccataatgtcatgaacctctgttggatacatagaaaaagcaatcttcatatctgaattaactcttttttcaagctctttgattcctctgataccgcctataaagtcaattctatctgatgttctgacatcttcaattcctaagattggtgttagtacattactttgaagaattgcaacatcaagttgcgctataggattattttcatcaaacgtcccatcttttgcctctaataaataccattctccttcaacatccatcccaaatgtatgcttcttagcaggctttacaggcacattattttcagatttagttacaataaagttttcctctaacttcgtaatcaattcttctttagtcattccatttaaatctttaacaactctgttataatccataaccattagatcattatcagggaatgcaaccgctaagaaatagttaaactcttcctcaccagtataatttggattttcggctcttctcttaagcccaacttttacagcggaagccgatctatgatgaccatctgcaatatataaataatctatttccttaaataggtcaactatttcgtctataataatttcattatctacaacccatacaatgtgcgttataccatcttcggctacgaaattatatataggttttcttttactttcattctgaatccaagcatctattatttctgatgcaatttgatcttccttgtatgttaagaaaattggcccagtatttgcatcacaataatcaacatgattaattctatcctgttccttatccgcccttgtaaactcgtgttttttaattatattattcatataatcatctatagatgcacagaatacaattcctgtttgagatcttccattcattatttgcctatatatgtataaacaaggttcttcatcttgaataaattctccatctcttatcattctatcaagattttctttagcctttgcatataccttaggatcatgtacatctatttctggatctaaatctatttctggtctatcaacgtggagaaatgagtgtggatttccaaccaccatttctcttgcttcatcactactcattacatcatatggtaaagctgctatttttgaagctaattccttaactggtctaattcctctaaaagctttaactatcgccatcaaaaattcctcctaaattatagattaaagaattcctttattactgaaactacttcttcacctattcttgtttgagcttctttagttgcagctccaatgtgtggggtagcactaactttcggatggttaattaattcttcattcttagttggctcctcttcaaatacatcaataccagctccagcaatttcacctttattaagtgcttctattaatgctgcttcatcaacgaccttacctctagcacaattaataagatatgctgtattcttcattaattccaattctttttttcctattaatgaaccagccgctttatcataaggtacatgaagtgaaataaaatctgaaacctttaatacttcttctaaagatacaaaatcataatctaaatcatcatgtcttccttcaattgtataatatacaaccttcatacccaaagcagttgcctttttagctaaagattgacctattcttcccattccaacgattccaagtgttttacccgcaatttcagttccttcatatttctttttattccattcaccatttctcatagtgtagttagatatcgcaataaatcttgcaagtgcaaacatatgaccaattgcaagttctgcaactgaatctgagcttgctgatggagtatttcttactgttactccttttccttgtgcagcaggaatatctatgttatctattccaacaccagctctaatagccaattttaaatttccgcctgcttctgcttcaaatacatcagctgtaagcttagtagctgatctaataacaactgcatcaaattcctttaatttcgcccccaatatatcttggttaaagtgttcattgacaacttctactcccaatccattcaatgcctcaattgacgcattttctaatccgtcgtttgttaatactttgatcatgtttaaaatcccccttaatttaaatacgcttattgctaatatttctaataaaatttataagcttcaaacaataactaattgttatatcatagttattaactactaatattattagtcagataaattatccgccttttcataatagctaacataaattcacacaattaattataattccactactaaagtgccataaacaatatccaatttccatatcctattaaacttatctgaattgtagagctaaaaaaattgcatagacttaaattccttatatttctatataattctaagcttctgcaccatataaattactctataataaactttaaattttatccttggacttggaatatttatttcacttcttaaatcctatcttttttattttactacttatttggctttaattcaatactttatgggccaaattatgattttaatattgatgcttttatactgttaaatctatgtaaatatgtcttaaaaattgcttaatataaatcttaaagtatatattttcaaaatcctagtaatcgagtacttatacttaattcagctggaaacgtaaaaaatcgcttgcagcagaatatattaaatagttttctttatagggacatgctccacttttgagattgcgtatttctattatttttaagagctatcttcggatttaatttaattatatcttcctaaaaaataaaagaaccactttaaaatataagcatattttaaagtagttctttcaatttatttaactaaagtttattattttttaccttctatatatgcgctatcaaagtatatatagccaagtggagatactcttacacctttaacataatcctttattccaaatgtcttagtatcgtgatataaaggaataataggcatctcttccattagaagatcttctgcttgatgtaatatatcgaatctcttgttagcatctgtttcattctttgctgcatcaactaattgatcatattttggattattgtatccaacttcattattaggagaagttgatataaacatgtctacaaaggtcataggatcagaataatctccagtccatgcacctcttgccatttcatagttcttagcatctctagttgcttggaatactttccattcttgagtttgaagttcaacatttacgccaatcttcttccacatatcttggattgcttgatataattcaccattaccattttcaggattgtataatactacaagtggtggtaatccttgaccatctggatatccagcttcagctaatagcttcttagccttttctatatcaccattttcttcaaagtactttttatttgcaaagtcttttccatctgggccagtaattccaggagctacaaagctatgtgcaggtgtttgaccactcttaagtactttttcaacaattgttgttctgtctatggcattagctaatgcttctctaaatttcgcattactcaatacttttgcagcatttggatctatttctttagctttatcagaaacattaacatcaacatattgagttcctaacatcttaaatgtagtagcagtcttatcttttatcgcttgctcaatttctgatgatggaacagagtataccatatcgaattgacctgtcttataacttgcccatgctgatgtattttcagtaaccatcttcattgtgattttatcaagtttgattttatctttatctggataattttcatttttttctagtacaatttgatctttaatcttataatctgtaaatttgaaaggaccatttgaaactaaagttttagcatcttttgcccaatctttatttccttcaacaatcttttgatctacaggcatatatgtcgtagatgatgttaattctaagaagtatggacatggtgctgcaagagtaactactaatgtactatcatcagttgcttttactccaacttgatctgcagttccttttcctgtattatattcttctccacccttaagatatagtaattggaatgaatatatagatgcagtttcaggatttaatactcttttccatgcatattcaaaatcactagccttaactggatccccatttgaccattttagatctttctttaaatgaaaagtatatgttaacttatcatcagatacttcccatttttcagcttgacctggaattgccttaccactctcatccaatttacatagcccttcaaaagcatttgcgtctactatagatccatcaactgcttggtttagccctggatctaaagtctttggatcagctgctaagttgaaaactaactcttgttttcctgaagtcgctgctttatcagttttcttagaaccacaaccagctaaaactgtaagtccaagtgttgctgctaaagctactgcgcataattgttttactttgctttttttcattgcatattcccccttaatttatcatttattatttattttatttatatctgtttaaatcatttttcccaaaattctttaacagtatactaaatatctaattaatttctattttttgtttaggcattatgagtttaactaatcacttttcttaccaaaatttagttattatacaagtgacatgccacaaaatggcctggctttacttcctttaactctggatcaacttctgaacaaattggttttgcatacttacatctacctttaaatctacatcctggtggtggatctattggtgatggaatatctccttctagaactattcttttattatttttagctacatctggatctggtattggtactgctgaaagtaatgcttgtgtatatggatgcaatccttccgaataaaccttattactttctcccttttcaaccattcttccaaggtacataactcctatatgagttgatatatgcttaaccattgaaagatcatgggctataaacaaataagtcaatcctaattcttcctgaagttcttctagcatgtttataacctgagcttggatagaaacatccagtgctgatattggctcatcacagactattaatgacggttctacagctaacgctcttgctatgcctattctttgtctttgtccacctgaaaattcatgtggatatctatttatatgatcactagcaagtccaacttttgataataaacttcttattctttctgttcttgcttcacctgttagtaatttatgaacatcaatagcttctcctattatatctccaacagtcattcttggatctagagatgcataaggatcttgaaagatcatctgcatttccttcctcaaaggaaccatatcttgttttgaatactttgttatatcttttccgttaaaaattatttgaccttccgttggttcataaagctttaatatagttctacctgtagttgtctttccacatcccgattcacctacaagtcctaaagtttctcctctttttagtgagaatgaaaccctatctactgccttaacataacttttacctttaaataaccctttatttgcagggaagtatttacataaatctttaacttctaaaattacatctttattatcttccactactccatcctccttataggtgattcgacttctggcgcatcctcatgacataaccaacatgctgtacgatgcttatctcctatttcaaataaaggaggttgctcttgaatgcaaatcttcattgcataatcacatctggctgcaaatggacatccaactggtggctttaataaatctggtggctgtccttcaattggaataagtttttctttaatatcttctttaggatttggtacacttcttaaaagtccccaagtataaggatgttttcctctgtagaatatatcttctgctgttcccgtctctactattattccaccatacattacatttattctactacatacatccgcaacaacacctaaatcatgagttattaatataatagcagtatcaagtttctgttttaattccttcattaaatctaaaatttgagcttgaatagtaacatccaatgctgttgttggctcatctgcaataataagctttggctcacaaattaaactcatagcaatcattgctctctgtctcataccacctgaaaattcatgaggatactgtttcattctcttttcaggacttggtattccaactaatccaagcatctttatagcttcttttctcgcctctgctttactgattttcttatgttttattaatggctccatcaattgatcgcctattgtataaactggatttagtgaagtcataggatcttggaatatcattcctatatcatttcctcttatagactccatttcaacttcttttacatccgaaatattttttccatcaaagagtatttctccgcctacaattcttccattgtctgctagtaatctcataattgacatcatagtaacacttttaccacaacctgattctccaactattcctaaggcctctcccttttctaagtaaaaagacacccctcttactgcatgtacttcaccggcactagttttaaaggaagtttttaaatcttttacgtctagtaatttttccatttttcattcttcctcctatctcttgttttttggatctaatgcttgactcaatccatcgccaaaaaggttaaagcataatattattatgcaaatcatcgctgctggaaaaaataattgatatgggtatgtgtatataccttgcatcgcttcatttgccaatgttccaagagatgctcttggcgctgcaatcccaagaccaataaagcttaaaaatgcttctgtaaatacggcttctggaatcaataatgttaatgtaaccattattgatcctatacagtttggaattaaatgtcttattaatattcttgcatttgttgcacccaatgactttgcagcaagaacaaattcttgttgctttaattgaagaacatctcctcttacgattctagccattccaatccaataggttatagaaagacccaatactatagtgagaagaccacttccaccagctgctcctggtttatttaaaatagccataaatattactacatatatagtcattggaattgaagatagaacgtctactattctcattaatatactatctactattcctccaaaataaccagctactccaccatataatactccaataactagatttataaatgctgccagtacagcaataattaatgaatatctagctccataaaaatttctaacaaacaagtctcttccaaggttatctgttccaaaccaatgctcagcagacggctttaaatatgtttgtgataaatcattagcagcataatcatatttagataacattggaaccaaaatagcagctgcaactacaagtactattatcactaatgatactattgccattttgtccttttttaatctcctccatgcatcctgccaatatccaacacttggtctaactactacatcgattttcttttcttctgcacttagaggagtaaacaattcttttttaatttttaatccattttccattttctcttttcctccccttatacttccgcatcttgtaattttattctcggatcaattaatacatataatacatcaacaaagaatgtaaagaatattaacattgtacaataaaatactgttaccccaagcaacatagaataatctctatttgtaaccgattgtacaaattcattaccaagtccaggaatagcaaaaatcttttctgttacaaatccacccgttaatatagaagccgttaatggcccaacatatgtgactattggaatcaacgaatttcttaaagcatgtttaaagatgattgtacttttgcttaagccttttgcttttgcggttcttatgtaatcagattttaatacatctattaacttacttcttgtaagtcttgtgataaatgataacgatgatgctgatagtgctatacaaggcattatatcatttttccattcaccaaaacctgttggaggtagtagttgaagttcaacacctaatatataaattaaaactgcaccaattacaaaacttggtattgtgatacaaagcgttgcaataaatacaaccactctatccggccactttccattttttaatgctgcaagtgttccaagaagtattcctccaattagtgacataattacagctattatacctaattcagcagatgctgggaatgatttacttatagtatctgctactcctcttccttcaaaaaccattgattcaccaaaatccccatgaaccaagttacttaaatacattgtgtattggtcgaataaaggtttatctgttccatactttgctgccatatttgccttaacttgtggcgttaacttgtccccatcaaaaggtcctcctggcataagtctcattagaaaaaatgtcactgttattacaaccaatattgttaacagacttactaaaaatctttttccaatatattttaacatgtatttctctccttcttttctattttatataatttattttttaatatttggaaattctgtatgaatatttaaaatttttaataaaattttaaatattttctgttttcttggaagcgcttccacattcgcttaaaaatttcaatatattatggcaatggagtcattaaacaaaactaaaatgtctaataactccgttgttatctatttatcaatatttaatttttactccataaaatttaatttattctcaatttaatac

SEQ ID NO: 110 - DNA, 18482 bp, Clostridium beijerinckii
attttatgtaaatttagattaataatgattttaaacgacataaaaatacagatatattgatgtattttgttataaaacatcaatatatagatgaaaatgtattacgaaaataagtgaaattatgttggaatatggtagaatataagtgggtataaaaatagggtataaaaaatatggtttgtgagagatggtaatcaccaaaaaaggctaagtagttaatacttaagcctttttttgatattgaattatattattgttaaatatttaacttactatatgaatgtagagtgactttgatataaaaagttacaaaatttgctatgagattaaagtgttatacaattttattagagttattagtcttatatgaattaaatatagtaataaataataaaaaggataacttgtttaagggaatcgagttatcctgaatactgatttgttgtatatttatttaataggagaacaattaatataaattgtttataatattataataaaggataattgtggcaatattatgtcaattaaaaaaagatttttactaaaattatgagaagattaagtgccagtgtactcgatttaaataaaaggaaaatagtgaataaattgaataattcaacaaaatatgctatgatatacctatattatgtatagaaaataattactatgtagatgaggagtgtgggtatttcatgaatataaacagtgaacttaagaaagttatcaatgataaattgaagataaactctgaggttgagtttatcgcgggattgaaagatataactttatcagatattgattatattgagaagttatctgcagttaaaaatttgaaatcaaaattaaattatcaaattgtagataatacttatataaaaattgattgctcattgtaacaaaatataagattaagaacaaagaagatagatattattaagattagaacaattaagcaaaagaaaaaatgataaatagaaatatgaattaatttatttgaaacgacattacattagcatattttatttgaagtgttgtttcatcacattagtttgaaatacagaagctaggattaaatgttctagctaattttatataaaaaataatattttgttataggaatattataataaatggatttaaataaagatttttaaaacatatgagaagaaaagaatatttttaaccctataagatagaaaattaaattttatcctatagggttaatataaacaattattgaattttaaattttagaatcatttcactaagcgtttgagcgagatcagcttgactgttagctgtttgtgatacctgttctatagctttagtagcttcatccatgctttctttgattgtatctatttgttcagttgacttttgtgttgttgcagccatatcttgtacaacctcacttacttggcctatagtagctgtaagttcttctgacatagatgcgatttcttcagacattttacttacaaaacttgaatcattataatactgagtacctgtttcttgataagcattaaattgatcatttacttcattatcaataaattttagtatgtcaattccggtagttatactgctattaaatgcatcctgtactttagaaatagttttttgaattgatgttactgcgtctgatgattgttctgctagagtttttacttcttcagcaacaacagcaaatcccttaccgtgttctcctgccctagctgcttcaatagctgcatttagagctaataggttagtttgagctgatatatttccaatagtatcagccatgattttaatgttatcaactattttaccattctcaataacctgcaccattttgttctctttttcagaatataagtcttttgtttgttttatagcgttttggctatttatttggactgttgtagctctttcttttgatttattcgcattattacttccatcagaagctttttctgaaagttcattaatatttgaattgacttcttcaactgaggcgcttatttcctctgtagcagcactggattcttgcattccgctagcaatgtcatttattgctttatcaatgtttacaactctagaggttaattcttgtgcagttgcagaaagttcctcgcttgatgcgcttatatcttgcgaattttccataattcttttaattaatttatttacattcgcttgagctttatttaaagcgactcctgtttgtccaaactcatctttccttttaaattcaattggtgttgagaaatcataagaagccagcctctcagcatattctttcatttttccaagagatacacttatgttttttgatataaaaattccaagagctatcgcgattattaatcctatgccagttagtatagacatagttatgttagaacgtacgtagattaaattattctcagtattagaattatcagcagaatttaaatttaattgtataacattatcaaggctatggagcatttgagtttcgattggttgcatgacctcaaattgattttgagctttattaaaatcacctagatcaactgcttgtattattttatttctggcatttcgatagtttactacgttatctttaaactctttataagcagaaacttcatcttgaggattgtctaacttttcataataagttatgtattgattatcatcttctactaaagacactatattattttttgactgatctattttaaatttatctttttcatgcattaatgataaaatatttgatctaatctgaaacatatttgattttatagataagttgtatttaacactttgcaaattattgctatacattttttcagagttattatttatagtccttagggacatagctccatctacaccaacgatgccaattaggatggcgaccgctaaaaaggatataattaattttgtttttacacttttcactgcgttcacttttgttcaaccttctctcataattttgattaattattccctaaattagtgatgtctaaaattaggattttagaatatttattaagtataattaatatttatttgattttattataagccatatgacaatccctgtaaatctttgtactgatatttcacctttatagacatatgaattaagcacttatgataactgctaaaaataaagtgttaattgcataactaaaagctgcgtgtggaagaatacatttattagtaaggaagtcaaggaggtgaatttatggaaaaccaacatctagcaccaaatgagacaatgcaagttcatgaaatgttaaacttcaaaactatatgcatgactacatcaaaaatgatggaaggtgtagtcttcgatcaagatctaaaggcattattagaaaaggatgtacaacaatctataacagcaataagtaacttacaaaatttattgaaaaaagctcctaaaataagatgagaattttatatataaattgtttgtaaaaatgctagaaaacaaaggagggaaaattatgattaatgattatttagaaataagaaatgcggagggtatgcctaaacttgtggatgcaaatatgtctctaggctttttattaaatgcaaaaagtggtgtgagaaattgcgcgattgcattgactgaggcgacaactccagaagtgagaactgttttaaagaatcagttaaatgatgcaattcttatgcatgaacaaatatcaaatcttatggtagaaaaaggctggttccatccaacaaacctagaaaagcaatttcaaatggatattgaatcatctacaacaatatctcaaattgctagtttagatttatttcccggagatacaagtagaagtggtatgtttgcaacactagaaaaataacaaaggaggtaattgtttaatgaaggctgtaacatttcaaggaataaaaaatgtaaaagttaaagaagttaaagatcctaaaattcaaaaagctgatgatattattgttaagcttacaagtacagcgatatgcggttctgatttgcacttaattcatgatatggttccaaacttaccacaagattatatcataggacatgaacccatggggattgttgaagaggtaggaccggaagttacgaaattgaaaaaaggtgatagagtaatagtgccttttaatgtaagttgtggagagtgtttttattgtaaacatgatttaacatgtatgtgcgataattcaaatcccaatggagaaaatggaggattttttggatattcagatacatttggaggatatccaggaggccaggcagagtatatgagagtgccttatgctaattttactcctttcaaaattccagaagattgtgaagtagaggatgaaaaattattgttgatgtcggatgcaatgggaactgcttattggagtgtagaaaatgctggggttaagaaaggtaatactgttattgtgttaggttgtgggcctgtaggactattagcacaaaagttctgctggatgcacggtgcagagagggtaatagcagttgactatatcgattataggttagagcatgcaaggagacataataaagttgaaactgttaatttcgaacaacatgagaatacaggggaatatctaagagaaatcactcatggtggagcagatgtagtaatagactgtgttggaatggatggaaaaatgacaccaatggagtttttaggatcaggtttaaaacttcaaagtggatcattaggtggattcgttatagctactcaggcagtgagaaaaggtggaatgattcaagttactggagtttatggaggaagatataacgcatttccttttggagatataatgaatcgtaatattaatataagaacaggtcaagctccagttattccatatatgccaacactttataaattacttgctgaaggaaaagtagatccaagtgatattattactcacagattgccccttgatcaagcgccatatggatatgaagtatttgatacaaaaactgacggatgtattaaagttgttctaaagccataggaaaagtttatttattaaggagggtaaaaaaatatgaatgatcaaagtattgcaccaaatgaaactatgcagttgcatgaaatattaacattcaaaaatacatgtttaactaaagctcttactatgtcaccattagtttctgatgaagaattaaaatcaatattgcaacaagaggtatctgtatcagaaaaacatattgaagagttgagaagtcttatggaaaaatctaatattgcatcttcagaagaataaatactatattttagaaaggagacggaattatgaatggattaatagaaagtcttacaggaatgagtaaaatgactgatcaagttatagctactgactttttaatttcggccaagagcggagtacaaaattatgcagttgcgataacagaatcaacttcattagaagttagagctatattaaagaagcaattacaagatgcaattcaaacccatgaaaaaatatcaaattacatgatggagaaaggttattacaatgcttatgatttaggcgagcagtataaggtagatatggaaacaacagatacaacgttgggtcttacaaagaatttaaagtgattcagagaacacatgtgacccaatataataaaatatgatagaaaaaaagaatgacttatttaggggaataagccattctaaaatactatttaaaagtatttttaaattagggttaataataatgctttaactactttacaaatattattataatagatttatgttacagaaatgttacagaatgataaatttattataaataatcaataaaaagttgattaagaaaattaaaattttagcaataagggggagtacaactgatgtattcgcatgagattgattataagataaaaggtgacgatatacaatatgtagaaattgaacttgatcccacagaaactgtaatagcagaggctggagcaatgatgatgatggatccaaacatacaaatggaaaccatatttggagatggatcaaaacaaagcggcagcagttttatgaataaaattttttcggcgggaaaaagagtgctaactggagaaagtttgtttatgaccgcatttacaaattcgggaacattaaaagaaaaagtttattttgcggcaccttatccaggaaaaataattcctatggacttgagtttattaggaggaaaactaatatgtcaaaaagatgcttttttatgtgctgctaaaggtgtatctgtaggaatagattttagaaaaaagttaagtgtaggcttttttggaggtgaagggttcatactcgaaaaattagaaggggatggcttagcttttatacatgcgtgtggtgcaatagttgaaagaaacttattgcctggagaaacattaaaaatagatactggatgtttagttgctatgactaaagatgtgcattatgatatacaatttataggtggaattaagaatacactttttggcggggaaggagtattctttgcaactgtaacagggccgggaaagatatgggttcaaagcttaccatttagcaggcttgcggaacgtgtatttgcagcagctccaacttctggcggaaaaaatagagaagaaggcagcgtacttggaatgcttggaaatattttagatggagataattagaaggaaaatagatttatactgatatatatatgatgggagtaacataagttatttatgattttacaacttatgttatttttttattaaaacaattagaagtttgtcaccgattagggttaaaaactatatctttatatattataattaagaagggataaattaggtaaataataataagttatataataaagaaaataaaaggcactttacagttgataatcattatcatataataagtagaagaaaggagtggatctatatatgaatgagaaaaataaagatttaactaaaaataaattaatcggaaaagatctattaaaatatattggcccaggaattttagttacagtaggttttatagatccaggaaattgggtatcaaacattgcagctggatctaattatggttataaactactttggattgttactctatcaacaataatgcttataatattacaacataatgctgctcacttaggaatagtaacaggattatgtatttcggaagcaattaataaacatataaataaatttttaggacgagtaattacaataacagcaatgttagcagcagtgagtactgctatggcagaagtattaggagctgcaatagctttggacatgttatttaatattccattaaaattaggtgcattaatttctgctgtagtaattatatttatgctattttccaattcatacaagaaaatagaaaaagtaataattggatttgtatcaattataggaatatcatttatatttgaaactttcttagtgaatataaattggggagaagcaatacgtagtgcagttgtacctagcattccagtaaattccctaccaataataatgagtgtattgggggctgtagttatgccacacaatttatttttacattcagaagtaatccagagtagaaaatggaatttaaaagataagtccatattagagagacagttaaagtatgaatttatggatacaatgttatcaatgataattggatttataataaatagtgctatgattttagtagcaataacattttataataataatgttcaggttaccgaacttgaacaagctcaaacaatgttaaaaccattgcttggaaattcagcttcgataatatttgctatagcattgctttttgctggattagcatcatcagttacagctggtatggctggaggatcaatattcgctggtttatttggagaagaatatgatataaacagtaaaagcagtaagattggagtattaataactacactggttgccttagttattatattttttattagcaatccatttgagggattactttattcccaaatgctattaagtatacaattaccaataacaattttcacgcaaatatatttaacatcatcaaagaaagtaatgggaaaatataaaaatactacattagaaaagattgttttatggagtattgcaggaatagttactattttaaatattatgctattagtaagttcgttttaaaacaatataataattcataattataagaggagcagttgagctcctttttttggcgtgctatatttttcttacatgagttcaaaaggtagatgcgtaaaaagtctacatatatgaaaagagtgctaagcacaaccacaatcgccgtaatttatattaggagtttacaagaaatataaaaatgttactatgaagcagaataggtaatctgcttttattaggaagtttatatttaacttgctttattagaggaatgattaattaatgaataatttggaaaataagttaaaaagtatggtaaaattagaattaaataaatattgtagaaataataatttctgaaaggaactgatattaaatgagaattttagcatatagtcataggcgtgatgaaacacagtatttcgaagaatttagtaaaaagtataatgttgaagttgtttcatgtaatgaggaaccaagtttagaaacagcacctcttgcaaaaggttttgattgtatcagtataattacaacaaatataaactcagaattagttggaaaatttcatgagttaggtgtcaaatttatatcgacaaggactattggatatgatcatatagatttgaaaaaggctaaggaacttggggttcgtgtagggaatgtgacgtattcaccaaatagcgtagctgattatactataatgttaatattaatggcagttagaaaagtcaaacttataatggaaagaagcaatgtgcaagacttttctttaagaggtattcaaggcaaggaattacctaacttgactataggtgttgtagggacagggaaaataggaaggactgttatcaaacatttaagtggttttggttgcaaaatattagcacatgatatatatgaaaatgatgaaatgaaatcaaatgctaagtatgtagatttggacaatctatttaaagatagtgatattataacattgcatatgccagcaacagacgataattatcatataattaataagaaagccattaaattaatgaaagatggagtctttattattaatactgcccgtggatcattaattaatacaaatgatttaatacatggaattgaaagtaaaaagataggaggagctgctttagatgttattgaacaggaatctaatatttattatagtgatctaaagggagagactttaaaaaatagaaatttagctattctaaagtcttttcctaatgtaataataacacctcatgcagctttttatacagatcaagcggtaagtgatatgattgaaaattcaataaaaagctgcatattattctcagaaaataaggaaaacccatgggagatagatatataatattataaatataagttacaatacataaatcactctttcttgctaaaactattaatatttcagattaataaaatactaaggagagatgaaatatgtttgataaaatccaattaccatatgcatttgatgcattagaaccatatatagatgcagaaacagttgaaacacattatagtaagcatcttcaaaaatatgtagataatttaaattcgcttataaaaggctatgagcagtatacagaaggtaaatctttagatcaattgttagcaaatgtgaatgagttgccagaagaaattaggcaaggagtaatagatcaaggtggaggtgtatcaaatcataatttgtattttgcacttctttcgccaactcccaagaaagctccagaaggaaaattattagatgagatacataatacatttggtgatttatatactctaaagaccgaagtaagtaatgcagctataggtcaatttggatcgggttatggttttttggttaaagataaagatggaaaattatcagtgagaaatacactaaatcaaaattcacctgctatgaatggggttgttccaattttgaccatagatgtgtgggaacatgcttattatttaaagtataaaaatctaagagcagattatgtaaaaaacatatggaacttaatagattggaaaaaagtagaaggtctatatttaaattatacaatttaaatacttttaacgataaaaaataagactagagagttgatgtgtttctctagccttgttatatttgtaagaaatggataaaatttatttgttacctaatacaatgaatcattataaaaataaggtttccagttgttataaatcttttcatgccttatacaataagtaatgtcttcaaggtttatagtggagtttaaaaggttaagcttactgctaaaggaatcagagaaagctttaaaagcatcaggaatcgacttagcagataaattgaaagtttcaagcggttcaaaactgctttcaccgtttctgtttaaagatataatttcataagcatcattacttgcttcttccactaacttatttatatttctttttaagtttatatcataattacttggataagttacttctaagttaattctataacaaatatttctggcttttacgcaaggcatttcgctagcaatttcgttatcatccaaataacctattgtcttagtcataacatcttctttgatatcaggtatatctattgaagccagagttttagtatagacatccttacttccatttaatgaatattccttttgattatttagtaataatgatttatcacttctgtttaaatctatgcaatcattgcatttttcttctgattcagaatcagatctatagcatatgaaagaatctattcttcttaaatctaatccgaaatagacccaatttctacggaaccatctaaaaccagatactgtacgtctgttaacacttaataagaaagtccaatagttatttccattctcttcccaaatatatgtgtatttataaagacaaaatcttatagagttagaactaacagctttagcatttacaccaccgctaactccgactttttgaactccagaatcatttttttgggggacataattaggtggtggagatttaggtgctccaggaggattgaatacaccaccgccagggtaattaaaatttggagaattatcataatcaaaattaggaggattaaaattaaagttaggaggatagtttcctggaggcggaaaacctccactatttggtgtaaaaggtgcacgttttttatcagcagattcatctaaaattggtgaaaattcaaagctattaaagtcttcgaagttcatagtatcgtcactaatgaactcattatcaattaacatttatattttactcctcagaaattagttataaataatatattcatcagagtttcagattgttataatttacgttaatataattcttgaacttttatattcttacataaattggttgtattcttaaatatactaaaatctaatttcaaaatcaatataggacgtactaggtaattcttcttcaacaatttcatatgctaagtttatccaactttcacatgtgttaagaattatcccatcgctagttacaacatgatccaatttatttagaataacatctgcatttggaataagaataacttctatatcgaagttgtatttatatagaagttctaatagccttgattttaatcttcctgtattagaaacaggagagtcaagataaaagatagccttacgtatcttcatttcatctaatcttttaccaatcaaatctattgctgtatccgttttatcaattaacttatatgttccacgaagtccagccaaatctcggagagttccgtccatacatttaattagtgttgagttagacaaagctacttcaagagtaataattatattaagaccatcaatatgtagtgtgctattttcgtatgtatctaatattttacgtttctgcctgctaataatatctttataagaagatatgcttctttttaatgctagtctttgcctagcagaaaataaaaaatgatttcctacaaattcaacacttttatctatactatacccgtgatttattaagtaatagatatccttttgagctttttttaataatgttaggttttcttcattaaattcaatttcgtcagatggaacaaagcctcttttaactatttgtgtcatataaatatacctcctaaagtagcatctatatctatataattattaatatctccataaatataccttgaattataacatacttatgtaaaaataatacaaataaatcatatgtgatataatgaaataattacttttatggagagtatagtagagaagcaattaaaaaattataggaattattatattaggtaaaggcaggaaattataacaatgtaacattgtatttatgtgataggaataaaataaattcattgagaataaaaaatatagctacggaaattttgttgataggaatcactcctagatcagaaatctgtagctatattatagttaaataaagtggattaatatcactattttgtttatagatatccaatttaagaatttaacttattagatgaatgtatttacaaatttgctaaaactttaagttcatatcttcactagaaatcataaatatattttcatagattttcggaacaaaatatttatgatttcggtaagttaccacataaatttagttttagatttatactatgaaatatatcccaactagaaactggaacaaaagtatgttattcatttcggcgagttatattcataagttcaggttttagttgggttatctataagtatataattaacaattagtttaattaaaatttaggaatgtctaagatagcacctctatttcctgacgtaacaagagcagcgtatcttgctagataacctgtagttatttttggttttcttggtttccaatttgcttttcttcttgctaattcttcatcgctaactaagaagttaatagtgttagcgttaatatcaatttggatcatatctccatcctcaactaatgctatgttaccacctactgccgcctctggagaaacgtgaccgattgaagcacctctgctagcgccactaaaacgtccatctgttataagagcaacggaacttccaagacctcttcctgcaattgcagaagttggattaagcatttctctcatgccagggcctcctttaggtccttcatatctgataacaacaacatctccagcaacaatttttcctgtatttatggcttcaagggcatcttcttcgcaatcaaacactttagctggaccttcatgctttaacatttctggtacaacggctgaacgcttaacgacacatgaatcaggtgctagatttcctttaagaactgcaatcccaccagtttgactatatggattttcgactggtctaataacttcaggatttttatttgcacatccttcaatgttttcaccaacagtttttcctgtacatgttataaggttagtttttaataaaccaagcttacttatttcattcataacagcgtaaattccaccagcatcatttagatcttcaatataagtgtgtcctgcaggagcaagatgacaaagattaggtgtttttgaactaatttcattagctatatcaacatttaaatcaaagccaacttcgtgtgcaattgcaggtaaatgtaacatactattggtactacagccaagagccatgtccatagtcatagcattcataaatgcatcttccgtcataatatctcgtggtcttatgttcttttcaagtaattccatgattttcatgccagcatgctttgcaagttttattctttccgaataaactgcagggattgtgccattcccttgaaggcccataccaagtacttcagttaaacagttcatactatttgcagtatacattcctgaacaagaaccacaagtagggcatacgttgttttcatattcatctaatttttcagctgtaatttttccagcattgtaagcgccaacagcttcaaacatacttgataagcttgtcttacatccgtcaacttttccagcaagcattggtccgccacttacaaaaattgtaggaatattaactcttgctgcagccattagaaggccaggaacatttttatcacaattaggaaccattactaatgcatcaaaggcatgagccattgccatagcttcagtagaatctgcaattaaatctcttgtaactaatgaatatttcattccttcatgtcccatagcaataccgtcacaaacagcaattgcaggaaagacaattggagtacctccagccattgaaactcccatttttacagcttcaactattttgtctaaattcatatgaccaggaacgatatcattttgtgagctcacgatacctacaagaggcctttccatttcttcttttgttaaacctaaggcactaagcaatgaacgttgaggtgcacttttagatccttttgttattacatcacttctcatagtatattctccttacatatatttataattatcgcgttgtatgttttaattataagttgtatgatgtctgttgtcaattgtaacataagattaaaataaaaaagtgctatttctataaatataaagaattagcactttatcttattcatttggtatacctaaatctttcattgctctaataatatgaattttcatggcagtttttgcaccttcagcatctctagcctccagaaactccattatcatgcgatgatcatttaaagtattttgaagaattgatttattttcatcggataaaataacaccattatcaattgctttgtataatataggcatcagcttgttcataaattcattatgagtagcttttgcgatagatttatggaaggatctctctacctcggttcgatcttcattatttaagatcatttcttcttcaagtcttccgtagtacaatattctttctaattccttatcagtggcgcgtttagcagcatagtaagcagtctctggttcgaaaattaatctcatctcatataaatctttaacatctaatttttgagtagaaagattttctaaccccatgctttcagtaatgttttttatttctgatacaaatgtgcctttgcctcgcctaatttctaaaatattgtgagcaactaaaatacgaatggcttctcttagagtagttctgcttacttttaattcagtagaaagctcattttcatttggtagtttatcaccaatattaaattttttatctatagtaatcatcgctagtatatcatcagcaacactttccgataagctttttccttttcgtggcataaacaaacctccttttaggttatgtttatataatataataaaagagtctagctttcaatagtgatgtctgatgtcttatgattaaagattcctataaatacaaaataaagctcgttgaagtgaatccaacgagcacatacataaaattagatttggttttcagggataaatgtagcacagtctgtttcttgagtatcgctagcatttttaggttgtacttctatttgttgtgcacaacagtgatcacctgacatataatattgacatgtattaacaacgcatttgattccttggtttggtgaactcattttttctggtttcatagttgttacctcctaataatattattttaattaacaataatattattagttaatggaatttttttatacgaaaaaatgtaagttatatttttcaaaaaatgactaaagatattttgtttattactttaaaaatgtattttttatcttttcgtgccactaattgtccattgatacgattacatgattatagtaatatataattaacaaatagattagggggggtacaaatgacatttgtaataataacagtatttgtgatttattcgatggtgcgtaaaccaagtaccgcatccaataaagagaaatagatttttatacaatcaaaattgtaaagtttaataaaaaataaatatataatttatattagaaagagtagcttaaacgctgctctttttttagtgttaaggaataaagtttagcattagcaatttttgaaatgcaggagttatatattaaactcatataatggcttaacagatgcttatgagttcaagctagtaataacatataaattggaatgacaattaagctaaaaatagttgttatgattgtatttatcgtagcatattcgtaatctgcattataacgtttagatactattgctgtattagtcatgactggcattgctgcttgaataacaaatacttctttcataagtaaaggagtatttgcaaaattacacaataacaaaattaatataggagaaatgacaaaccttcctaaaagtattgctagcatgtcccagctaaatctaaattctttgaaattaacagagtgaattgttatccctataaacaacatagctaatggtgttgttaaattaccgaaatatttgcaagtatctagaacaaactttggaagatgaatatctagtaatataagtaaaacagcaaaagtaaagcttaataaaggaggtgacatgatacgttttattgtatcaaaggaaaagatattggcattggtagagtcgccatcacgactaatttcatatacaccaagtgtccagaaaaatgtagtatttgctatgtagtataataaaacattcgggatgcttttttcaccaaataaagccatattcactggaagaccaataaatatagaatttgatacaaaaaacattgatctaaaggtaccaattcgtttcttgtccactttaatagctttagaaacaattacggcaattatataaacaatagccatggatgtaaatggagcgaataatccatcactaagactcaatagtttctctttatcaaagctttctgtaaattgtgaaatcatgaggcaggggatagcaagattgcacactaatcttgaaaaaagctttgaagttttttcatcaaaccagcctttatgagataaaaagaatccagtagaaatcatgagaactatactaaatacacttcctaatgcattaaaaataatcattataaattctcctttaatatatttttaactaattgaattaaagaataatggattacactttgacttatataatgcaatcctttgataaaatgtttttcaaatgttttaaatcattgtctatgtggttgtacattgctttatatgctttttcttcatctctctttttaatataatgaaatatctcaagatgatgattgaaaatatccatattacgctcaggttcataaacatctatagatctataaaaataagtgagagaactcaaatctttactcaacttttttagatgattattttggctgaaatctaagattaaatcatgaaatttagtatttagttcaataatacttttagtaagtgtatcatcaaatctttctatgtttttttgaatttttactaataccttttcaatttcatctaattctttatcagatgctttaagagtagttaattttgcagcctgagattctaaagcttggcgacattcataaatattttctatgtcttctttagttggcttataaattgtaatttttgatttatctccaataacaagtagtccatctttttctaaagaacgtatggcttctcttactggacttctgcttatttgaaattcgctggcaagtttggattcataaatcctatctccgggttttaaaataccgttaaatatcatagcttttatagaattgtaagcttgatcatagtaagaaggcgctttttcaattttatatttttccattactttatcctcctatagattgtgttaaaacgattaattaatgtcaatatttatacaatgtatactgtcgacaaattaattttagtataatctacatatactaaataatcaatataattgaaattagattgtaaaaataaataaaaaacctggtggattaaatttataatctaccaggccagataattatattagcctattttatttatcttcttctatgatgtttcttatgttcaactagatcgatagctccaagaaccatgtgagctgcaccgaacccaacaactccagcagcgataactggtgccatttctactgccaccatagctgcacctacacctgttacaactgtacctaatgcggttggtattgctccttctcgaattctcatatttattcctcctttaaactaatagagtttaataatagtatgtttttatctaagatttattatttaccctgaattattcataaaattatatgaaacatgctttgcatggctcgttaagctgttcttaacaaattcaaaacttcacttattaagtgaaaaaatatagaaaaatagactcaaatttgttatggtta

SEQ ID NO: 111 - DNA, 18433 bp, Clostridium beijerinckii
caaatccaaaggattcaatgttggctcatcttttctgcatctcctccttacggataaaatacatgatttagatttaaaatctaatgcctttttttataaatgtccttgacaatgggaccactttagaggatcttagcccttttttgatgattactcatccctctcataatcattaattttatacccatccttattttactatctttcaacaatatcttcacttatttttatattacttttttatgtgtatttttatctttttctacaatatcccggtataaatttattttttcatgtcgttttagaattcaacataggatatatagtattttcatgtcattgattgtaatacgatttattttgataaaaaactccatgcattttatactttaattgtacgaatttacttcaatactctctaattttagagcggcttatttccttgataagtcgttcttttttataatcattttttgaataaattcagaaaactaacgcaacaaaaatctatcaatccaactttattcctatataaatatttttaataactattaaactttattttttagttcttcttttctttatagtaagcggtctacttttttgtatagataaacaatttaataattagacttattagatgaacatattcaccaagttgctaaaactttgaatccatatcttcactagaaatcataaatatattttcatagctttttggaacaaaatatttatgatttcggaagttaccacataaatttaattttagagttgggtgtctgcatatcagtgctaaaaatttaaatatttattttgtttatattaagttaataaatttgacacaatcatgtaacattaataatatacaattaaacttgtaaagtagttaaagcattattatttatccccttaaataataataaaagaatgacttatttccctaactaagtcattcttttttttgtactgaacaatattatttaagcacttagaaatactcaatatcaccaatacataaaatgttattatcatcttgtaactgtactttgtaaagctccataatcatcaaattgataactcttgcctgcatccaaaatagaagtattaaccattttccctcttagattttcgacatcagtatctgattctccatcaaaattagaaaagtagaaccaatttccattaatgcttttccatcctaaacagcgttttccgttctccatgtaataccagttaaaacctttggtactacccaattgcttccatccagtaaaattctgtccattttctgtatagtacaaatagttatttttatttatcattttaccaataactttatcattctctatataatagtaattattagatatattcttgttttctccattttcaattttccatttataagaatttgaatcttcatattttccgctaggattgcttgctgcaactccatttgaatatattctataaccatttatttgcgtatctttagccatatatccattttgatagaaataataccaatttccatcaacttttctccaaccagtagcccatagatttccttcactataccaccatccaatattatcttgcttccatgatgcgtttgcccctactgggttcaatagcattattgatgtggcgatcattgataaagctacggcttttttccaacagttttttatcacgttatcatccccttaaacctttatatcataattatatatgatttacatattttgtcaaactaataatatgcattgttgtattcatttaccaaattcatattattttaaattatgcaatatagcaaaaatatagtctacataaattaattataattttaagtgtaaataaaaaaatcgcaagcgactgtggttaagttccgtattgtgcttcgcactcttttcatatgtgtagatttttttcacgcatctgccttttcgaacgcatgtgagaaaaatttggcaggcgaatatgatttattttttattcttttataataattaaccctagtaaaacatactattataaagttatacacagatttaattgaattataatttcctaaagaataaaaaaacttcagttttagatgatttcataatactgaagttttcatatataatatataacctaatcgctaaataaaattaaaatttatcaaaccaatttaatatatattctgcaatgcacaatgcacatttcacatttcacaattcacaattacagataaaattcttgtaatatttttagacttataatgaagaattatttttgcaatatatattacctagcatttatctgcatttctatctttcattgaagtcgaacttcatatctaactatattatcactaatttttttgaacatctctctaaacgcactataaaaatcatccatagttatatttgtttcaatttccaaggccttgtataaattatttgtattaaatttttttcttgatatatttgctagaaatgcactttcaaaataatttatagcgttttcttcaagccttcctttaatagattttattaatttttctttatcttctttagagatttcgccattaacacttactaaaattttattctcattaggatgaaatccaactgtttgataaccataatcaaccatcatttttaatattcttttgctatcagtataatcgccactcctcatactaaaatcaattggtttattatctttttttgtagttaaacattttgtaactttatattctttataattatctttgcgatttcttattatcgtatgaatctcactgtaagtataatttttgcacttcctatcgattttttcattttcatcaccaatgattctcttccactgatcgactagatatccattatatctttcataaagcattcccataagagcttgcactatcattctctcttgattcaaagaaatactaattagtccgtccttatttgatgattttatctttataggattgcctaatctttcactttcttttctaattagtcttaataattgcacaaaatcattgtgtgtgtccaatttatctaatgttcttttgtttatatctttaaattgttctgttacaataactttatcttctttgatccctaattttttagctgtagcatatttcaatgtatctattaaatcttctctggaattggaatctaataagtcgttttcaaataaatgatttttatatgattcaaactcgtttaagacataaaatattctcttctttaatgtagtatcatttatattttctttcaattccaaaagatgttctaaattattactacatttagatataaccataaataattctttataatcctcgccaacacgattttctattgtttttgctatattttcacctttagggcaatcaataaatattattcctaagtatctcgctttgctagcaggaagcttaatatatgctctttcaaccataagatcacaagaagtatttattccgtaaatgacattacacaaatttcggaaatctctatttaaaaacttattaatataatcttgagcttcatttgcatattcatgcccctcttcattacattcatagtattttgaaatcattttcaaccatttgctataatgtttatgaaactcatctttgaaatctccaaaataactcttccatatatgctcatctttctcttcaaaattatcaaagtcatcagaagaatttattttccttaattcaataagcaattcattaaaattaatatctttaaatacattttgtatactattaacttcataaaatttaattaaggaaacattattaatttgattgtttaaagaattataaaaagctttcttaaaaccttcttcactaaaattatcgttttctacacaattatctttatcaagaattagatacgcctcatatagtgattttataatctcatctttaagtttttcaaccatgctaagttcatttttcaagcataaataaacattaataaaattgctttttgtagatgagcacagcatttctgttggaaaactaatatagttgtcactttttaaaaaatctgtttcttcaaaaattccatctttaataactactttttgcaattgagatttccctaaattctcaagatctatcacgtttacccttgtcttagtttcattttcaaatttgtttatgatattccccataatttcctccctttattaaaatataatggagcttgagtatttaacatataagttaatatataatattattttttgtaaatatttattccaataaaacaaggcaaaatgcacaattatttaattcatgaattaggtaaaataaaaaggagagcttttgcatatataatgcatgctctccatttcaatttaatttttaaatctcactaagttttttgtcaacaagttctttagcgacttttgggttcgctttaccttttgacaatttcattacttgacccattaagaatccagcactttgtgtctttcctgctttaaagtcttctactgattgagggttatttgcaattacttcatcaactattttttcaagttcatcagacgaactgatttgcataagccctttttcttcaatcatcttcattggatctttgttttcatcaaagatttcatcaagaacttctctccctacattattgctaattttaccttcttcaactaccttaagaagctttgcaaagttttcagcttcaagaggcatatcttcagattccatttttctatcatttaatattcttaaaatatcacctaatatccagttagaagcaattttaggcttagcacctaattctacaactttttcaaagaaagtagcaagtcctttatcgcctattaaaatatcaacttctttttctgtaagttcatatgaagttaaaaatctttctttcttttcatctggcatttcaggtaaagatttagttattgtttcaatttgttcatcatagattatgattggtggtaaatctggttctacaacatatctatagtcatctgcttcttctttagatctcatagagattgttttaccttttgcagcatcccatcttctagtttcttgaactaccttatgaccttctccataagtataaagttctctttgtcttctttcttctttttctaaagctttttgaagttctctaaatgagttaatatttttaagctctaccttagttccatattctttttgccctactggtcttaatgaaatattagcatcgcatcttaatgacccttgttccatacgacaatcagaaatttcaccatattctaaaattgatttaagctttttcataaacgctacagcttcactaacacttctcatatctggttctgtaactatttctgctagaggaacaccaactctgttatagtctactaaagaaattggttctccttctacgtgaactagctttccagcatcttcttctatgtgaattctatttaatctaacttttacttgctttccttcatgttcaaattctacaagcccacctgaacagattggtaaatcaaattgtgaagtttgataatttttaggaagatcgggataaaaataattttttctatccattttgttatatttatttattgtacatcctagtgcagttcctgcttttattgctaaatttacaacttcttcattaagcactggaagcgttccagggacccctgtgcatattggacatgtattagcattaggttctgctccaaatttagttgaacaagagcagaaaatttttgtcttcgattttaattctgcatgtatttcaagtcctattactgtttcaaaattcatcgtaattcccctcctataattcaatagctaaagcttgctctaagctatatgcagctttgaatattttttcttcgcataacatatcacccatcaattgaattccaattggtaagccttctttgctctttcctgctggaattgatattgctggatttccagctaaattaacattaatagtgtaaatgtcagctaagtacattgataatggatcagcctttttttcaccaattttaaaaggtaatacaggtgaaactggtcctactattaagtcatatttttcaaaagtctttttaagatcatatcttaattttcttctaaaagcatctgctttcttataataagcatcataatatccagaagcaagtgcatatgttccaagcattattcttctcttaacttctgctccaaaaccttcagttctactgttttcaactaattcatctagatttgtgtaatttggagtcttataaccatatcttattccatcatatctatctaaattagtacttgcttcagcagatgacattatataataagctgctaatccatccttaattataggaagagaaaatgtttcaacttctgctcctaattcttttaatttatctaaactattttttactgattccttaatttcttcatctaatccttcaccaaagaattcttcagggacaccgattttcatacccttaattccatcttgaagactagcagtataatctatttcttttaaatctcttatgcttgtagaatcatattcatcagttccagaaattatatttaaaatataagcactgtcttctactgaattagaaaatggtccaatttggtccaatgatgaaccaaaagcaataagtccaaatctagaaactaatccatatgtaggttttaatcctacaacaccgcaaaatgctgctggttgtcttatagatccaccggtatcagatcctaacgacactggtgcgaattttgctgcaactgctgctgctgatccacctgatgatcctcctggaactctagttatatcccttggatttaaagtctttttaaatgccgagttctcatttgaagatcccattgcaaattcatccatatttgttttaccaataattattgcatcttcagctaataatttttttattacagttgcatcatatggtggaataaaatcttcaagcatttttgatgcacaagtagtgtttactccttctgtacaaatgttatcctttatagctattggaatacctgcaagtcttcctagagattcaccagcttttactttagcatctatttctttagctttagccaatgcttcttcacaagtaagagttaaaaatgcatttatagtcccttcgttttttgtaatttcttcaatatatgattgaactagtgcttcactagttaattctccacttttaattttttctaccatttctttaatattcatttgcattatctagtcaccaccctattcaataatctttggtactttaatataagtctcttgcatgtctttaacatttctaaataaatccttacattcgaattgtttaacttcatcttttcttactactggctttaattctgccttattatctatatcttctttaatatctaaatctaattcatttaaatattgaaaatgctctaaaatattttcaaattcttttgcaaatttagcagcttcttcatcagaaaatcttaatttagaaagctttgctatatattttacttcatcaatactaactttcattaatttcacctcatcaaattttttgtcattataatgctgtttaaaacactatgttaaaattcattaactttgcataaactaattagctttattcaatagaagctttttaggtttctattgaataacttttttaaatgaaactcgactcactacgttcgctgagtaggttcgacttaacaaatataaaatttgaagtcttacttaaggaaactcgactcgcattcgctcactgagtaagttcgaatatccaaatgtaaaagctcacagagaaagttctgctaaccaaatataaaatttggagcatcactttttggattctcacttacggtgttaatctcttcatgtctcttgggaataatgatgcttctcttatatttccaaggtttaatatttgcattgtaattctttctagaccaattgcaaaccctccgtgaggtggcattccatatttaaatgtatctaaatagaaagcaaagtcttcaagctttaatcctagtctttccattttagcttttaacatttcataatcatgtatcctttgaccaccagttgtaatttcaacgcccttgaagattaagtcgaaactctttgtcatttctctattttcttcacattccattgcatacattggtctcttagctgttggatattctgttaggaatacatagtcactattatatttttctttaacatatttatggaatagtgcttcaccctcattatcaatatttccaactggagattttttattaaattctgttaataaaatttcttgagctttagcaagtggaattcttggaatattaatttcttctggaagaaccacatcaaataatttcaattcttcagcacatttttcatttaagtgtttatataaatatcttataaagctttcttccatttccataagatcagtttcgtcttttataaagcccatttcaacgtctaaactaacatactcatttaaatgtctccaagtgttgtgaagttctgctctatatgcataaccaacttcaaatactctttcaaaacctgctccaaccatcatttgcttccagaattgaggactttgtgcaaggaaagctcttctgttaaagtaattaacagtaaacatttcagatccaccttctgttccagaatgagttatctttggagtatggatttcttcaaaatcattacccttgaagaacattctaaatgcttcttcaatttcattttgaaccttgaaaattgcttttttcttaggaattctaagacttattgttctataatccaattgagtttcaagagcagccttttctttaaagctttgaatttcaaatggtaatttgtcataatatacagttcctgctattttaatatctgatacttcaatttccattccctttggagccttttcattttcgcgaactattccagttacttctactgcattttcaagtcttaaacctttaatttgttccttagtacatactaattgaattatcccagatttatctctaagtaagataaatgaaacatgtgaaagatcacgaattttatgaacccaacctttaagtaatactttttcttccccgttaactgctaaatctttaataaatattcttttcatgattattgctccttttcccatatattgattatttttacataagatttttatagatattttgtaaaaataaatatttttattttaattaaaatttataataaaaaaatcgtaggcgactgtggttaagttccgtattgtgcttcgcactcttttcatatgtgtagatttttttcacgcatctgccttttcgaacgcatgtgagaaaaatttggcaggcgaataagattttttttattcttttctaaatacaaatactattcaatcaaccttttttaagttatctacaggttttactgaaatataaattcctaaagaataaaaaaatctcgtccctatgcattatgcatagggacgagattaactcgcggtaccaccctagttagtttataaaaaactcacctcaatgaagtacaaaacattattgttttatactctccacttttaacggtatggacccgattaagcctactcttttaatctaaaatttcggttaatagctccgaagtgttcttcaattcaagactcatacagatattccaccatcatctgctctctaaaaatcatctatttgaatttacttttcttcatcattgcatatataaattttaatttctcaaaaattaatttctttattatttataagcatatttgctttatggaattcattatattgcaaaataatttataaatcaatactttttttaaaaatttgttaatgaattttcaaattatacttttttatgaataattttcttgaaatgcattttaaaataaactaagtttttacagtgcttagagtttatcattttaattctttcattaaaacaaatcttcttaatccaccatattttaatttatcttccataacattatacccaagttttttaaatgtattcaggctatatttattatcaggataaactgttgcacaaatacaattcattcctgctgttttgcttatttcttcaagagattcacacattatcttttgaagtttatttcctctataatcatccaaaaccatagttgattcaatctgccctaccttaagcaacttttccccttgaatttttatatcatgtccataattatgttcatcgtatccatattcaatatatgctcctatagcaattagctcatcttcatctaacgaaacacaacccaagactatacctttttcatttatagcagtttcaaattcttttttatctgaacatacaaagaaatctttgttttctaatcttgtatatacatcatcttgtaatttcataattttatcgatatagcttacatccaatagtttcaatcgggcttgtacaacacttttatcttttttatttaatactatttgtttcattctactttagtaagaatacaactatatttcttactagtccccccccttaatgattaatatctgatttgtattatactataataatttgattatataaaactatattacaattcacaatgcacagttcacaattcacagttccaattaggattattcttgcaatattttttagacttatatctatgaagaaaacattttgaaattagttgttacacaaattttattcttttaatttcaaataaagccttaaagtgcatttaattaccccttaaggcaaattttatttagtaatgaactctaataagccaaaacttaatttttttatcactccatcctaaatcccatggaacattatttctatctgtattatgacacgttactaaggaatatcctttagaatcgactcctgtaactgtcgatacatgggttatatcacctttcttttcgtatgctatgaaatctccgggaagtaatttataagaagccttatataccttttcataacttcctctagcaattaccgatgctcttccgctattaatcatatagtgagtaaacttaccggcatttacccaaggacctgttgcacttcctttgtcatagttccatgtagaattttccttgaattttcctccttcgcgtagtatttgtgacgcaaaatttgcacaatctccaccttctggattaaaatctctatatttattattatacttaaagccatattcctcgatagttgccgctccacagtacctttctgcatattcctttgctccttttcttttttcattaatatttgaaatatctctaggaggctgtgatgatatatattgtttaatctcatctgctttaatattttctaaacttaaggaatcagcaaatggatctgtataccattcctttgttattatccaattattatctctcttgcttaattgaaaagaatgatatgtccccattcttgaactatttatagcttcaggttgatccggatatatgtacttatactctgtattacaaattaaactaaaagaacatttattgtctccaattttcgattttttgattactactttaggaacgatatccacaaattgtattccctgcttttcagcccagttattaacatacttaacctttttttcctcatactcatatgcccattgaccatatctagtatcagtagcatataaggctttaattgaatccaaatctttgctaagtatagctttattttttattgcaaatatattttctacaatacttttcacttcattatcagtactagtatcagcaaatacaatgctacttttatcactagtaatcaatgataaaaacacaatgaatactaagatgattataaattttgacctgttttttttgattttagagagtcgcatctataatacccctttctaaattaagtcattctgttacaatttattgttaattatttcaatatacttattagtttcttcgtttagaggaataccttggaaccattcatcatttttattccaattagcaaaatatctagcttttaatattatttctggtctatattcaaaatgcaatatatcaaaatgtccccattttcctccccacacgaaattattcttttcaaatgcttccactagttctttagggtaatcagagagtctttcctttccagccttttctgaactccacttccaataatctctcttatcacttttaagatcaattgcgattccatatgaatgtgggcttagccttccagttccagatataactctataattaaatgttccgctggcagggtaaagtatactacctatatctgatcttgattttgctaaaggcattaattcttttaaagctgcttctaaagacgcattagcattattttgcttattgaattgataattagtatatccatactttaagctagctaagtttttttcaattgctcccttagaatttccatatacttcgcttaataactcgtaatgtctagctctaccaggatcaaaatttttatccatgatctctgtatttttttctaatgggtagtcttgctctaacatatcttgtaaatcaggatttgttaattttacttcatgattttttttctttttatcatcataaataattttcttacctgatttcataattatgtaaacttcatcatcacttttcttttctacatctactatatgttgaggatatgataacataagaatcaaaatatcctgcttcatctctgtttggtaatccctatcttctgatgcctttgaatctataggaatgctaaaaataataaaaaaacatattataaaattactaatttttcttatcaattatatttcaccacctttttaatcgtataaatatatactgtcccaagaataaacatactatgtacaataatttcttataaaaacttactaaacaaattttaaaaattcataaaaaatcatattttttaattaatatcaaaaaatatgatttttttatgaaaagctatcattttttaatatattgctaatttaacaactgtttttagggattctattgttaaattttttatatagaatatttaatttttcatataaataccactattacaggttataatttaacatttttgtaagcaaaaatttgcaagttgtcgaatttgttgctaaaattgttatgttaataaaatatcaaagaaagaggtttattatggaacttaaaaaagacagtgatataacgatgaaagaagtttcatcaaacgaatcaagcaaaatgaaacatcctccaggtctgtatatgttattttttacagaaatgtgggaaagatttagttactatggtatgagagcattgcttgtaatgtatttaactacagaatttataagaggtggacttggtgtagataaggtatctgcaatgactatatatgcaaattttacatctcttgtatatcttactccactagcaggcggatatatctcagatagatacttaggacaaagaaaagctatcactattggaggaataataatagctcttggacagttaacattattctcaaaccaaagtatgactacattgtacataggtttatttttacttataatcgggaatggtttctttaaaccaaatatttcaacaatggttggtcatttatatgctgatggcgataaaagaaaagattcagctttcactattttctacatgggaataaacgccggatcatttttagcacctcttatatgtggtacattagcagaaaaaacaatggctactacacaagcaggtgaaattatacactacggatttagatatggtttcttagttgcaggacttggaatgattttaggacaagtaatctttaatggattagcaaacaaattccttggagatattggtaaagcacctgtaggtgtagctaaatctaattccaatgataataaagcaaaagctaagccattaactaagcaagaaaaacatagaactgcagttattttaatattaacagcttttgctataatattctggacaggcttcgagcaagctggaagttcacttactatatacacacaagattttataaatagatcagtaaatggatgggaagtgccagtatcttggttccaatcattaaatccattgtttatattaatacttggaatacctatatcaaagctatggtacaaattagcttgcagcaagagtggtgatttaagtattcctcaaaagatggcaacaggttcaatacttctaggacttggtttcttacttatggttggtgctgttatgcaaagaggaggaaatatagaagatactgctattaaagctaacatgatatggcttgtaggaacttatttcttccatactgttggtgaactttgcttatcaccagttggactttcaatggtaagtcaattagcgccagctaaacttgcatctttcctaatgggtgtatggcttctaagcagctttgttgctaatcaaatagcaggaagacttgctggttacacagaaactttaggacacttacaaatatttgctggaatagctgctacttcaattataatgggaatattattcttattatttaataaaaaattagcagcaatgatggaatagtatattatgaatagaagcttgtctttatacgcaaagacaagcttctatattttattttaaaaattatactttatcgtagaaatctaataattcatctaaatatggtttttgaatttcatctttttctaaatatatttcatgtctagagttttctatcttttctatttcgcaattctttgagctacttgcgaatttattttgtccttctgcctttacataagtatcattatcagcttgaaataataatgttggaatttctacttttgatgcattttctggttttataatttccttcgttgtatcaaaggcttcttttgtccaattatagctagcaccacctctttgaagttctttgttattagctactatatcatgactatatttataacgattcaaagaacttgtcccaatctcattttccttatactctggtgtatatgctttcttacctaaaacgtaatttccaccattaccaatagcaacttcaaattctactataatatcagctagaaattttggtatatttccagtgttaacttcaagcatgggagcacttaataccgcagcatcaaaataatctgggtaatcctctatgaattttgttccaatagttccccccattgaatgagcaaacaataatacctttttaccttgattattgggcataacaacttcatccataaattttttaaaatcagttacatattgatcgaatttttctacattcacttgggttttatcagctattccaagtgtgccggatctgccatgacctctatgttcaattccgaaaacattatatccttcttttaaaaaataatatattaattcatgatacttctctaaactctcagtatatccatgagatattactatattagcctttgcattttctatattgtatttttcatagtacaatttaacgtccttatctccatctatatatccagattccagtttactttttatatatggttcgactttacttttcatatcttcattgtaattatactcagatatatatatttcatctaatttactatttatttcagcagcattaactttaatattaaaagtatttatattgacaaatagctgtactataagtgaaattagcattaaaccaattttaaatctttgagcatttctattactatgcttccccaattgttttacatcccttcttatacattaattcattttataaaagaaaaagctgtatcaacagctaattatcctataattattctaatatagaaattacccacttattacatgctgtacacttatgtactgttataacaaataaatcaaatctcttatttagatccataactcctaaagcttctctctcctctttagtaataaactcatcattttcatcaatatatccaattatctcaactagataatttttctttgtcttatcacaacatccattggaacctgcaatctctataatctcataacttaaattttcacttaactcatcaataatatcaattatatcttcataatcttttatatcatcaacaaaatcctcttcataaaactctaaatctttaatttgaaataatttattcatacatatcgctcctatttttatttatatatgttgcaattcacaatgcacaattcacaattacggctaaaattcttgcaatagttttagaatcatgatgaagaattatttttgcaatatatatattttttttaatataaaacagtaatttcatactaaaacattataatatgttaactttcttttagcaaaccaattcgattcaaataacttataaccgatatacaaatttaaaattatattacgtgtgttaacttgccgaaatcataaatattttgattccgaaaatctatgaaaatatcgctgaaggttctaagcagcaggttgtatccactttagcatgctcccactttcagtgtgacaagcaaaaatggaacaacctacagctaagaacctttaacagctcattttcaaatattttctccacaaatatatttatgatttctagttaaagacatgaacttaaactttgggcaaatttataaatatattcatgaaataagtgaagtataattgcataaaaatatagtagactcatcattttttcaataagatgaatctactatatttaatgttgctcttctttatagatatccaatttgagaattatacttatagtttgaaaaatctgctatatcagaaaggacaggtactcttttgtaaccacaggggtcataatatgcagtgttacattagagaatatgttgcaggcatttcttcatcataagttgttccattttgcttgtcacgagcttgtctcgtgagcatgctgaaatggtgcaacttatgatgttagaaagcctcaacttattctcagtaaccgaaacaacagagtacctgtcctttcggcagattatcgcataagtctaaatttaattttgttcttctttaagtttttttaatttattttgaactaaccataacttcttttgctttctattaaatgcaaccattctgtttttattatttttgttttcatcaattaactttatatattctgcatctgcaatttttaatgcatcttcaattactaaaagttcctccttggtaaacataatgcctcctttattaactaacaacctattatttttttgattttgccgtctaacataagtatattaaaaatcacttaactagtaaagctgcattagtttattgtcaacagattaaatctactcattacttattaaatttaattacaaccttaaataaatctccatctatctctatattaaaagttccaccttggacttccacaaaactctttgcaattgcaagaccaagaccagatccttctgtattccttgatttatctcctctttggaatctatctacaatatcaaatggatcaaaattcaactcttctgcagacatattttttattgtaatctctacatttttctcatgatctattatgtctacatatactcttgatcccttcatagcatatttgactacatttattattagattttcaaaaattctaaaggttttttggctatcaagatttaatatcaccttacttgcagggtaactattttttaatattaactttgaatcctttattttatcatctaattcaatttgcgtctgtctcattaattctacaatatctacattcactaagtttagcttaatatctccactagtagccttacttacttcaaacaagtcttcaatcagaaattttaatctttgtgattttttatcaattgtatcaatatacgattttctttcttcttcagttaaattatctttttttaataaatcagtataagttattattgaagtaagaggtgtttttaaatcatgcgaaacatttgaaataagttcagttttcattctctgacttttaacttcttcacttaccgcttttttcaaaccatcttttattttttcaattctatcttttagtggattgaataatcctaaatcatcctctatttctacttctaaattaccgccagcaattctatctgcttcatttaaaagtatactaaacttattccttatatctccatactgttttctaattgaatgaaataatatcatattataaattaatgctattactattccaaaaaaccagaaaatacagcagattaacattattatcaaatttacgccaataacttttataatgaacttattggatttatcatttaaatctatatgctctatataat

SEQ ID NO: 112 - DNA, 18430 bp, Clostridium beijerinckii
atgtaattatgctgtatttttaccattggatacaattaatctaaaaaatttgtatacattttcattttataaaatacttttacataataagcattacttataataaaggttctacacaaagaccaacgttctaaaatgacttagaacggtggtctttaaaattatatataaactttacttaagaatattttatattaattaaaagtttcgttactgctgaaatttaactgtatttaacatattttctttaatctatccttcattatttccatcactcttttctctttatatttaaagatagatatgaaattttaccccaattctatcaaactaatttcgggtacaagttagttgaattagcggtaaataaagataatcctaatcttaatattgatgaagaaagtatctcaccaaaagaaagtgctgaagttctttggaacttagtaattaaggaagatagtagcggcatggagaaacttggttacagcaaagcttttggcgaaagaataattaagaatataaataaaaatgattttaaaacttttaagaaagaatctggacaatctggtatttcattatcagatgatcaacttcaaggaatgataactgctctaagaagtgctataagtaaaaactcagttaattttgaagaggtgtctaaaacagataattctgcacaagttaaagtatcatcaacatttatagatagagatcaaatctctaaagatgctgtaaatattactacatctcaggcactatcaaatggtattagagataaacaaaaacttacagaagcttacgttgcaaacctaatagattcaattaataagggccaaataagctcaacaacaactgaaaatacattcagcttcaccaaagtcggaaatatatggttgccatcagatacaactaattatactgaaagcatttctaaaatggttatgaaataattagaaatatcataaaaagtcttaacaaacttaagcgattcagaataggactttacctctattctgaatcgcttattttttttctgctataatctagctttaaaatcttcatatccaaattcttttattacttcaatacctttttcttcactatattttacaattgcaggaagattaacgccattaaatgtattattcttaaccattgaataaatagccatatcgcaaaatacaagtttatcacctggctttaaaggttctttaaatgaataatctcctataatatcacctgcaaggcaagtaggaccaccaaatctataagtaaattcgaattcatttggctttccagcacctattatattaggtctatatggcattgcaagtacgtctggcatatgacattccgctgaagtatctagtatagctatatccattccatttttcatagtatctaatactgttgatacaaggaatcctgtatttagagcaatggcttcacctggctcaagatatacttgtacttcatatttatcttttatgaatttaatagatcttattagtgtttctatatcataatcttctctagtaatatgatgaccaccaccaaagttaatccacttcattttcttgatgtactttccgaatttttcatctaccacttttattgtacgttcaagggtatctgaattctgttcacacattgtatgaaaatgcaatccatctataccttcaatatcttcttcttcaaagttagccaaagtaactcccattcttgaattttcaaaacatggattatatatatctgtttctatctctgaatactcagggttaatacgaatagcacattcgattttctttcctttaaagttttttactttatccttatattttctccattgactaaatgaattaaatactatatgatcgctatatttcattatctcatcaaattcatcttctctatatgcaggagaataaatatgtacttctttccccatctcttcatatccaagtctagcttcatgaagagaacttgaagtaactccttttagatatcttccaatcaatgggaaagttgagtacatagagaatgctttagttgccaaaataatattagcacctgtttccttttgaacataatctaaagtctccaaattcttcttaagaagtctctcatcaaccaaataacatggtgatggtaatttgcttaaatctatatctttcattaaatcaccaaacctttttaattatgttttatagataaccaacataataaccacactttaacttataacttaccgaaataagtaacatacttttattccagtttctaaggaatttgataggtgattctaagaccaaaagttgtgcccaaaatgctagcttcaaagacaagctctgaacaagcatatttggaacaacttctaatctaagaatcacaaccataagaattccttatgaaacattccataaaagtatgtcactcatttctagttaaggtatatttgaaattataaatatatttcatagtaggttatctatataaatgacaaaccataagtcatgacaataatctcttgaaaattttactaatatatatccattattctataattttacctctagaaacttttcacttagtattacttgtataccaagtagaattcacatgtattttctaaacttatgtgcaaatatatattagaaatagaatacatttttgtgaaacaggcatttgaaaatgagctgcttaaggtacttaatgccaggttgttccattatctgcttgtcacaatgaatattgggaacatgcaagaatgggtacaacctggcatttagaaacttacagcaaaattttcattagtcctgtggaacacaaatgtattttatttcgttaggtcaccacatgggatagttcatacatttcttattcaactaaagttggatcaaagctttctttccatggtaatccccatttatttaactcttccataaatggatctggatcgaattcttctacattatatactcctggtttcttccataaacctttcattactaagcttgcacctatcatagctggaactccagttgtgtaagaaattgcttgagatccaacttctttataacattcttcatgatcacaaacattgtaaacataatatgttttatcttttccatcttttttaccttggaatatacatcctatattagtctttccttttgttcttggacctaatgatgcaggatctggtaatactgctttaaggaattgtaatggtactatttgctttccttcaaattcaattggttcaattgatgtcataccaacattctcaagtacatttaaatgtgttatatacttttgtgagaacgtcatccagaatcttattctcttaattcctttaatatttatacctaaagattctaattcttcatgatgtaataaatacatatcttttggtccgatttctgggaaatcataaactctctttatttcaagaggttctgtttctatccatttcccttcttcccaatagcttcctggagctgtaatttcacgaatattgatttctgggttaaagttagttgcaaatggataaccatgatcaccagcattagcatctaatatatcaatataatttatttcatcaaaataatgcttttgagcataagcactaaatacaccagtaacccctggatcaaatccacttccaagtaatgcagttaaacctgccttttcaaatttttctttatatgcccattgccacttatattcaaattttgctgtatcaagtggttcatagttagctgtatctacataatgaacttttgtttctaaacaagcatccataattgttaagtcttgataaggaagtgcaagatttataacaacttctggtttaaatttattaataagtgctactaattctggtacattatcagcatcgacttttgctgtttgtatttttgtcttagtttttccttctaatgaagcttttattgcatcacactttgataaagttctactagcgatacaaatttcctcgaacacctctgaattttgacaacatttatgaatagcaacgctagcgacaccaccagcgccaataattaaagcttttcccattccaattcctccaatttctttataaaatgaaacttttcagatggagatttatgctccagctgaatttagaatattgacttattattttttgattatcttcaagtcatgaacaaagaatttaattgtactatctgataatttttctaatcagtaagtccatttaacatatccctaacgtaagttggaagtgcaaagcaccctacatgaagatctgtattataatattttgtttttatccctaacttattccaagcttctgcattaaaatcctttatagggtgatacttttttgaagcaaatccaaataaccaatgtcctgatggatatgttggaatatgtgcttgatagaccctaatgattggaaaaaatttcgttattttttcatgagcttctttcattgcagccgcatcattatcatagtatggactttcatgttgattaactaaaattccatcttctcttagtgctttatagcaatttccataaaactccttagtaaataatccttctcctgatccaaaaggatctgttgaatcaactattattaagtcatattcatcttctttatcacgtataaatttcaaaccatcttcatagaatacattaactcttttatcatcaagcttacatgatgttagcggaaaatactctctacaaatatcaacaactcttttatcaatttcaaccatatctatcttttcaactgtgctgtatcttgtaagttctcttattgttccaccgtcaccagcacctataactaaaacattcttaatatttggattagttgccattggtacatgaactatcatatcgtggtaaataaattcatctttttcagttaccatcattaatccatctaatgtaaaaaaccttccgaattccttagcttcaagtacatctattctttggaattcagttttttcagtatgtatttctttttcaactttaattgaaaatcttacattttctgtgtgttgttctgtataccataactccatttacttgtcctccacaacattaatattttcaattttagtatcttctgttccagttaaaaaacaacctttttcttttgcataatttatgtagtccaatatttcttttgttattttttctcctggagcaagaattggtattcctggtggataacacattacaaattcagcacatattttctcactgctttcatttagcggcactgaagttttttgagaataaaatgcttcctgaggagttaatacaacttcaggatctatatactcatgatcaaacataccaattttatcttttgaatgcaatctcttaatttcagataatgaagatattaatctttcaattgcaagactacgatctccaacagaaataatagctaaaatatttgcaatgtctcccaattcaatttgtataccatactcatctcttaatagatcatatacttctattccagcaagacctatttctctagtgaatacagataactttgttatatcaaaatcataaactgcatctccatcaattaactcttttgaaaaggcataataaccgcctattttatttatttcacctctagcatattcagagatttgctttactttatcaaaaatttcttttccatgtaatacaagatctcttcttgccaaatcaagtgatgacattaaaagatatgaaccacttgtagtctgagtcaaattaattatttgacgaacatatcctattgctaaatcacaatttaagagtagaaaagaactttgagttaaagatcctccagtcttatgcatactgactgctgccatatctgccccagcatcaactgctgataaaggcatattgtcaccaaaataaaaatgtgttccatgagcttcatctactaatacgtacattccattttcatgggcaagtttcgtaatttcttttaaatttgaacaaatcccataataagtaggattatttacaaatatcgcttttgcgtctgggttttctctaattgctttttttacatcttcaaccgacatcccaagtggtattccaagttgtttatttgttcctggatttatataaaccggaattgctccgctaattattaaagcatttatagcacttctatgcacattacgaggcattataatcttttcaccttttttacatacactcataaccatagcctgaactgcagaacttgttccattaaccattaaaaatgcgtgtttagaaccaaatgcatcagccgcaagctcctcagcttctcttataaccgataccgggtgaataagattatcgagtggtttcattgaatttacatctactgaaagacattgctctcccaagaattccctaagcatatcgtttcctcggccctgcttatgacctggtacatcaaacggaaccactctagctttcttatattctattaatgcttcatagattggtgctcttgagtgggattctttgtttttcatcgtatacatccctccccgttaatatatattagttccactaaaaatctcaatcatctctcttcttaagttgttttcaatttcaagtctttgctttggcttgatttcataaacatctctattaaaaaggtaattttgaagttcaatttctttaattagcattttagtgtgaaatatatttgattgatatacatttatatccattgcatcatatctcttcaaggtattttcatcaatataatcttgtattgatgttattttatgatctataaataattttttgccatcaacatctcgggtaaaacctctgacacgataatctatcgttatgatgtctgaatcaaaacttcctataagatagtttagtgcatttagcggagatacttctccacaagtggctacatcaatatcaacacgaaaagtagcaattgaattatctggatgatattctggataagtatgcacagtaacatgacttttatctaaatgtcctacaacagtgtctctagttttcaaaatgtcaatttcacctttattacaagatgcatctatttctttgactgctagggtctgttccgatactagaatagttacacttgctccctgaggatcataatcttgttttgaaatattaagtacatgtgctccaatactttccgttacatcacacagaattctagtaagtctttctgaattgtattgctcatcaatataagcaatatagtccttttgctctcgctcactttttgcatagcatacatcatagatgttaaagctaagtgtttttgtgaggttgttaaagccgtataacttcagcttgttttccaaccctaacatcacaacctttctggcataaattatagttgcattagaatttgtttcaaaaattcaatcactaaaatcctatatattctaatgtttataaccttcaaatactcaccttctagtttaccttgaaacatctttattatacaacattgacattttactatattatctttaaaattgctactatttatgacaatatttctttaatatacttgataaatttgtttgaagtcccttatgctttattttggttgcaaatccttcttatttctcacatatataaataaagtaataattaactattttttcttaaagctctttcttttacatattgattatattcttctattgaataaacttctggttctcttacttcttccaagaaatgtgaagcctctgcatctgcattactaaatgccaaaactgacttatgcatttctattgccttgttgtagtctctatattcatcctttggaacataagcacccatatgccatcttatcattaaacattcttctaatgataacttgacaaactgttgaagtagaattacacttttctctccatgtcctaaaggaattttatcgtcaaattcataggctgcatatcctatccactttcctgtcatctcatctttttttaatctcatagttttttcataaaaattacacttacacaaatcatgtagatatcctgttaaatacattgtatcatgactcaaacctaggttatattgtttatttttttgtattaataattcaacaacattatcagagtgaagtgctaatcctccatcaaagtttgaatgaaacttagtagatgctggggctgtaaaataatcggttctttctaaaagatattttattaattcatctatcccatctcttttaatcgagctcaatctttctaatatcttatctttcaattcttgcatttcttttgctgccttagcttttgtcatttcctttaagtcacttaaatcactcatgaatacatctccttacattaatcaacttataattattatttttttcctctaagcacatatctattcattattatgcttcttttactattttaacacttttaagaaaaaactcatatcattgaattcaatgatatgagttttctaagttaaaaatattctttctttattttaatagtaacatattccatagagtttataagcaaattttatttaaaaaagtattttattcttctactactggcaaggcgcttaaattgtttgactcatcatcatctcttaaactccttaaatattcctcaccttttcttgatgttgagacagatactccagatatagctccatctttggctagctccacgcctctttctttagttattctctctccatttgaaagttcatatcctgttatctcacccgaatgctttattatagcctttatagagcttttttcaacatttgactgtgaatcttcgttatcacttaactttatgtcagtatttgctacagcagcattatgaataaagtcatatgttaatcccattgaagatacattatatttatcctccatacaaacacctcctattttctagataagcatatgtgtatatttctaaactctgttttttaattttttaaaataaacttgctgaataattaaaatatagcaagtcagtattttagtatattttcttttatatgcctattctaaaaacctttagtgttatattgtccaataaaaatactttaatgcattctattatttactatttaaatattgatatcaaatttttgtaattcatcttccagtttccttggttcttttaagactattccttttaatccaagcttaatagcagcttcgatattttgctccatatcatctataaatagagtttcgcctggttctaaactatatctatatagtatcttctcataaatttctttttcaggtttaagtaatttctctttataagaaaccactcctccttcaaataatttaaataagtcatacttattatttatatattcaaaagctgctaaatgaaaattagatagataataaattttataacctttttgctttagttttttcaatgtatccacgctgctttctattggaatcagcatatcgtaccaattttcaaagactttattaattaactcttcactttcagtgtttctgttaattatatttcttttagcatcttcttcacaaattgttcctctatcaagcattggccattcatcactctgaaatatacatttatatatttcctctactttttcttcatcaatttttgatcttacatatatcttcggttgaaaatctaaaataacatttccaagatcaaatattatatttttaatcataaaaattctcctaattttaataatgtatcttattaactatatggttcctcaatgatattcaaacttatgaaatttcaatattgctgttattcagaaatttgaaacagttgatatgtattgttatcaatatggaaccctatagatatccaaatttaaaactaaacttatgtgataacttaccgaaatcataaatattttgttccgaaaagctatgaaaatatcgctaaaatttctaagcagcaagttgtatccaatttagcatgctccacctttcagtttgacaagctaaattggaacaacctacagctaagaacctttaacagctcattttcaaatgttttctccacaaatatatttatgatttctagtgatgatatgaacttaaagttttagcaaatttgcaaatacattcatctaataagttgaattcttaaattggatatctatatatatagatatccaatttgagaattatacttatagctttaaaaatctgctatatcagaaaggacaggtactcttttgtgcagtgttacattagagaatatgttgcaggcatttcttcatcataagttgttccatttttgcttgtctcgagagcatgctgaaatggtgcaacttatgctgttagaaagcctcaacttattctcagtaaccgaaacaacagagtacctgtcctttcggtaaattattgcataagtctaagttttgttttggatatctatataattttatatttgtatgataaatttaactattaatattccatactaaaggccaatatcttctgctacatttctcattcctaaaattgtattttctataaccttgtctaattccatatctatcatcttgcaaccatttaatattacatttctgtctactcctgccgcaaatcctttagtcttaaattttttcttaacagatttaacttctagatccattacgcttttagatggtctcattaatgcagctgcccctataagacctgtaagttcatctattgtataaagtaccttctcagcattgctttcaggttttatttcatttactattccatatccatgagatgcaaccgctcttatataactctccggaaatccttcttctctcattatttcttgagatttagcacaatgcttatctggatacatttcataatctatatcatgaagtaatccaattatgccccatacatcctcatcttcattatagagtttagcaaaatgtctcattgccccctctactgctagtccatgttttctgagtgcatcacttttattatacttacaaagtgcgtcccatgccttttgtctattaattttttcttccatattatatagcccccttaacatatgtatataaaattatttttattaacatttatttctatatatgaaattatatccatgttaataaaaataatatcactatgaaaatttataatcaatattattaggatttaagttataaaattatatatatcatacttaagtttctaaattataaccccaatgtaaaatccttctcactagcatttttaaatgtgaatttattattcaactttataaatgcagacttcctatttataagtctgcattttatggctaatatttttatattcatcctttagcttagtaattactctttcttcatcatatttattatacggccatattctagtttctaccttacatctaatccactcagcttttaaacatatttgcacaagctcatctatatctctatttaggctttcaatttcattttcataattacttactatatagtcgcttttttcaactatattatttattaattgcaaatcatctctgtatgcagatttaacttcatttttaagttctagtaaatttaataaatttatattatttttatgttcaacattcttataactatttgccatggccaaaaattcctttaatatttttttttcacttatcacatctatagcttcataaaatttcgttgttatatcttcatttctttctgcagattttattgcatttttacaataatatattaataaataactattaagtgtagcttttaattcttctacttttgatattagctcaatatctagttttcctgtaaaattcaaatgcattttaatcaacgatactattttatctaactctcttctatattcaaccttattacttccatctttagttctaatatataagttagttatattgcttagctctttcaagcttgcaatatgcgttcttaatgtagttatccatatgactctaaatcttgtaatattatttatgtaaagagttttcttgttttgaaataaattaagcactcctgttaaaagagttattaatattcccgtaaatgtaattatatctattattgctatctccagttctccgattctcataaaattctcctaagttccttagcttatattctctagctgtctttatatttcataaacaaacataaaaaagaactaagattacagttctcagccctcgttcttgtgtttattttattcattttttcctcttttattctgtattctaagcataaaatattttctttcattaatatatatatttcaaaaatgattcttcatgataattctaaagatattgcaataattttagttgcaattgtgaattgtgcaatgtgcgttgtgcattgtgaattgcaacatatatatattttattatagattaaattttagtatccttttatatgcctctgtaataaactataataaagcaattaacaaaaaggtggtaaaatgaatcctttattaagtatgatactcagttccctatttaatggaatgggtggcggatttagaaatcccatgatgcctaaccaaaatggtggcagtaatccaaatcaaatgggtggtaatcctttattgaacatgcttatgggtggcatgggtggcggcatgaaccctatgaatggaaatccattaatgaacatgttgatgggaaatatgggcggatctaacggttctccatttaataatccaaataacaaccctaacatgaataatgcaaataatatgaatagcaatggtccaaatatgaataatatgggaaatatgaacgatattaattccttattaagtatgctaatgggaaatcagggcaatatgcctatgaataatatgaataatatgatgaacaatatgaacaacaattcaaatagacattcccattcaaaaaaatagtggacattctaataggtagcttaaaatttaggctacctattaaattttataacagtaagccttttctataaaaatattctaaatttatatattctcaaataatcacttcagaaataattattatttgtaatctttctcatgaaagattaagcttatcactgttgtcctattaagcctctatctatagtgtatattcacagattttgtatatatctaaaaaattctaaattttcttaattccctctttactttttaatagtaatcgcttactattaaattaaaagggaggtattaaatatggagaatattaatgtattaaaaagtgatttcacaaaattatttgcaaaagatgctgaaagtgttttcttttcacctggaagagttaatttaattggagaacatactgattacaatggaggtaatgtctttccttgcgctcttactattggaacttatgctttagttagacaaagagaagataaaaatgtattagttaactctttaaactttaaagaattaggaattttagaatttagtttagagaatatgatatatgaaaaacaacacgattgggccaattatcctaaaggtgtaattaaaacttttgaaaatcatggttataatattcctaacggatttgaaatacttttctatggaaatattccaaatggttctggattgtcctcttctgcttcaatagaagttttgatgggaactatattaaatgatttgttcaatttaaatatcaacatggttgatatagtaaaaatgtgtcaagaagctgaaaataaatttatcggtgtaaattgtggaataatggatcaatttgctattggcatgggaaaggaaaattgtgcgattcttttagattgtaataccttgaaatattcatacagtactattgctatggatggctacaagatagtaattgccaatacaaataaaaagcgtggtctagctgactctaagtacaatgaaagacgaagtgaatgtgaaactgccttagctgaaatacaaaaagttaagaatattaatgctttaggtgagcttacagaagaagaatttgaagaagttaaatcttgtatttcagatcctattaaagcaaaaagagcaaaacatgcagtatatgaaaatagaagaacattaaaggctgtaaaagctctagaagaaaatgatttaactctattcggaaaacttatgaatgattctcacatttctctaagagatgattatgaagttactggaatagagctagatactttagtttctcttgcttggaaaagtgaaggtgtaattggagctcgtatgacaggcgctggtttcgggggctgcacagttaatattgttaaagaagactgtatagattcatttgtagaaaaagttaaagccgaatatacaagcaaaattggctatgaacctagcttctatgtagttagcatttcagatggaacaagaaaaattggataaaagatttactacttaagattttattaagttgattataagaaagatttagtttaaatttaaagtataagtctttaaaccaaatcaataaaaataagggagatgttaatatgtcaatattagtttgtggtggtgctggatatatcggctctcatacagttcatgaacttgtaaaacaaaataaagacgtaataatagttgataatttacaatcaggtcatatgaaagctgtaaatccaaaagcaaaattttataaaggtgatataagagattctgagtttttagataaagttttttctgaaaataaaatcgatgctattatacatttcgctgctaattctttagttggcgaaagtatggtaaaacctctactatatttcaataataatgtatatggtatgcaaatattacttgaaagcatggtaaaacatgatattaagaatatagttttttcttcaactgcagcagtatatggagaaccaaagaaaattcctatctctgaagatgatgaaacaaatccaactaatacctatggtgaaacaaagctgactatggaaaaaatgatgaaatgggttagcaaagctaatggaataaattacgtttctttaagatactttaatgcagctggtgcactagaagatggaagcatcggtgaggatcactctcctgaaagtcacttaatacctctaatacttcaagttccacttggaaaaagagaagctataactgtttttggagaagattatgatactcctgatggtacttgtataagagattatattcatgtactagacttagcagacgcacatataaaagctgttgagtatttacaaagcggaaataaaagtaacatcttcaatctaggtaatggaattggctttagcgttaaagaaatgattgattcagctaaagaagcaactagtgaagaaattgaagttgttgtgggcgaaagacgtgctggtgatcctgcaagattaatagcttctaatgaaaaagctcaaaagattctaggctggactcctaaatatactgatgtaaaagctataatcaaaacagcttggacatggcacaaaaataatcctaacggatatgatgacaaataataaaatcatatagaattttaaaatttatcttgggaaactagagccaacctaaaaacttatatggttcaagtttccgccacctaggcatagaaaaagataagtctatgaaataaactaacatggacttattttttagatatgtcttagattaataccttttgttaaaattgaggaggttttagcatgataaatataaatcatgaaataaatagacttatgaactttgcattgaaaaaaaatcttataaataatgatgatataatttactctaccaatatgattcttggagtattaaacttaaatgaatttgaagtttgtgaagttgatgaaactttagaaactccaactcctatcttagaaaatatcttagactacgcatgtgaaaataatttaatagaaaatacagtaactgaaagagacttatttgatactttaattatgaactgcgtaatgccaagaccttctgaggttataaataactttaataatttatataatatctctccaactaaagctactgagtactattatgatttaagcatttcttctaactatattcgaaaagatagaattgacaagaacataatctggaaagcatcaacggaatatggagacttagatataacaattaatttatcaaaaccagaaaaagatcctagggatatagcaaaagctaaattaattaaatctagttcatatcctaaatgtttattatgtaaagaaaatgaaggattttatggtcatataaatcatcctgccagacagactcatagaattatacctttggattttgataaacaaaaatatttcttgcagtattccccttatacttattataatgagcattgtataattctaaatagcgaacatatacctatgaaaattaataaggatacttttaggaatttattgatttttactgatatactacctcattactttgctggatctaacgctgacttgcctatagttggaggatcaatactatctcatgatcattatcaaggtggtcactacacatttgctatggaaaaagctccaatagaaaaaaactactcagttaaaaattatgaagatgttgaaataggtagagtcaaatggcctatgtctgttgttaggctttcaagtaatgataaagataaattattagatttagctgaccatattttaacctcatggagaagctactcagatgaatctgtaaacatattaagtcatacagcggatgaaccgcataatactattactcctattgcaagaaaaaggaataataaatatgaactagatttagtcttaaggaataatagaacaagtactgagcaccctcttggtattttccatcctcatagtgaagttcatcatattaaaaaagaaaatataggacttatagaagtcatgggacttgcagttcttcctgcaagattaaaagaagaattaaatgttttaaaggaatacttaattaatataaaagacaacattttagatgatgaaatggtggcaaaacattctgattggtataaatatcttctagaaaaatactctaatatatctcaagaaaacgttgattctattctaaaagaagaagttggatttaaattcttagaagtattatgtcactctggagtatttaaaagaaatgaaaaaggatttgctgcctttgataaatttataaatatattataaggtggaataattatgaaattaaccatagtagatgtagctaaaaaagctaatgtatctgttgcgactgtttcaagagtaatgaatggaaattatccagtgaaagaagaaacaagaaaaagagtacttgaagtaatagaagaacttaaatatattcctaatatgcaagcacgtgagcttactaaacagaagtcagctactataggtgttgttgttcctagtatcaataatatgtttttcccagaagttataaacgggattgaaagcagcttaaaagcaaataatttgtctttagtgctagcatgtagtaataatgatagtgaagaagaaaaattatgcgttaacaatttattatctaggaatgtatctggaataatagttattgacccaaatacagaaaatattaaatctaaattttttcataatatttcaaaacaaactcccattgtttttgttaatggacattccgtgtccacaaatatttcatctgttgtaaatgatgaagctatgggtgcaagtatggctttaaactatttattagaaaaaaatcacaaagatatactatttgttagaggaaaagatagttattcttatgacgtaaaggaaaaagtttatacagaaataatggatgatttaaataattttaatccacaaaatattatcaacataggaaatggaaatagtagtgaaactgttgataacactgttaatatattcctaaatgtccttaaagcatctactgcaactgcagttcttgcctgcaatgaccttatggctgttggtgtacttaacgcttgcaaaaaactaaatatagatgtaccagataaattatctattatgggattcgataatatagatttgagtaaatttgtagaacctaagttaactactatagatcagaacatgtttcttcttggctcaaatgcagcaacactgctattagaaaaaatagaatgtgataattcttgcagcaagagaattattcttatgaatactttaattgagcgtgatactgtaaccgctatttaatatatttattaaaataaataatgcatttgttatagttactgattatttttaatgtaacatataccaaagcattatttttttaatttaatcataaataagtttataattgaattctatttacatagaatttactcttacatacggaatttaacttttcattttagtttttttatcaaaactttaaaatgaattcattgccacagaacatata

SEQ ID NO: 113 - DNA, 18261 bp, Clostridium beijerinckii
aaatctagaaaatagtaaatactaaataagaaaaattatataaattaagcctagaatgtaaattctaagaacacctatagaaatataggtgtttttgttgtaaaattgtaatatataggagaaaattagatggttttgtttaattattttaaaatgatttattaaaacaatgaaaaatggggaggggttctttgaagattatagtcagacatgtacctaatttaattacaatagcaagaataatactatcagtatcatttgttcaaaacataattgagcaatttatatatgcgaaggaaagaaatgtgaatttgagcgttttatttttatcaatatgtatttcagatttattagatggcaaaattgcaagaaaaactaattcaacttcgataataggagcaaaactagatgtatttgcagatttgttttatattatgatttcatatatagcgttaataagcataaaaattttgcccatatggtattttggattcgtatgcttgaaattcactgaatttataataacatcaaagcatatcaaaaatattaaaaagtcggacaagtcatttattttcgatagagcgggtagattagtttcggctacatttctagtaattccgggcattgtatgtatatatggatatattggggctcataatgcaataattacaatagattatattatatatataacatttataattggagtttattcttcttattcaagaataaaactttgctttatcagaaaggaacttgtataaatatatagagttatgaaaggatgatgaggatgaggagaagtatatcaggaaaattagttatatttattagtatgataataacatggggattatggctatttgttgagcctataagagaaatatctacaatgagtggatattctcagttaatagctgcatttgcattggtagtatttgcatttattaatttcatttcaactagacacaaaattttagatggcttatttgatggactagataaatcatatatttaccataagtatttaagtatttgtgcgttagctttggctgttattcataatataacaataagtatggggaaaaaaattgaaagggcaaatggaataaaaattcctaaagatccttatgctatgtatgggacttttagtatgtatatatttataatacttatattaatcgctcttgtggctaaaaaattaaattatgagaagtggaaaacaattcataaatttatgattattccttatgcatttggaatttatcactattatggaagtgcaacttacgctgtattttcattggaacctttttgtatatggctaaatcttataaacatcataggtataatatctgcaatttatagtgtattcctttatgaaaaaatttcatttaagtataaatataaggtgaaaaaactagatatagtagctaatggaacctttgagattacaggtgattctaatggaaaagaaataaaattcaaacctgggcaattcgcttttttgaagattttaaataatgaaaatggatttgtttcacatccatttacaataagtgaagcacctaagagcggagaattacaattcactattaaagcattaggagatcatacaaaggagttgttaaatacacttaagattggagatgaatttgttgtctcaggacctcatggtaaatttaattataaaactggtgtcaagaatcaaatatggattgcaggaggaattggaataacaccttttaggagctttgctcaatcaggtgtaggggaagaattctcggtagatcttttttatgcatacaataatgaagctgaaggagcatataaagaagaattgcagctattaaacagtaataatttaagagtgcacttatttaattcaaaagaaaagggatttttatcagtaaatgaaatatctaaattggtgaatataaaagatagtgttgatgtttacttttgcggtccagccccaatgagagaaaatttaaaaaagcagtttaaagatagcaattttaatattataaattttaattatgagcattttcaatttaaatagataagatatagatttattgaaatgtcacactactcagaggtaaaagtgtgacatttttaattgtataatatggagatttaacttgggagttaacagaataatgttactttaaaactgagtaatataatacgtacaagctatgttataattagtcccaaatagtaaattatttttcatattaaggaggactcagatatgactgtatatatagcattgttaagaggaattaacgtaggtggaaaaaatataattaagatggcagatttgaaacaagtatttgaatcaatcggactttgtgaagtaaaaacctatattcaaagtggaaatgttttattcaaatcagatgaaacagaagatattctgtgcaataaaattgaaaatgggattgaggcggtctttgggatttctacaaaagtcattttgaggacttctacagaattagaacagattatcttaaattgtccattctccaacgacgaaataacaaaagcagagacattatccaaagtagagtgtttatatgttgcgttattgaaacataatcccttaagagaaaagattgagtgcatagatgtttatggaagcgaaagtgataagtaccaaattataggaagagaagtatatctattattccatcatagtattcgaaattcaaaacttgctaataatcttaataaattgaatgtaccaacaactgtgcgcaattggaaaacattaagtaaactttctgcattagcaaaaaatatggagtaataatgtaatttgctatgaaataaaatgcaatgctgaaacacataaaatagtaatatgtatatgatagataaagtataaagataagttgcaaaatcttcttgaattatgtaaaaatattgagggaaatataaaggcttagaggctttacggaggtaaaaatgagcaaaatattagtagtattttattctttttcaaatacaacaagaatgttagcagaagaaatagcaaaacaaacgggaggagatatcagggagttagttcctgaaaagtcctacgctttcaattataatacagcagcaaaggaagtaaggaatgaaattgaaaatggatattgtcccaaattattgtctggagaagaaccagttaagtcttacgattacatttttttaggtactcccaattggtttaaatcatttgccccaccaatactaagctttttaagaaacgtggatttgcagggaaagactgttattcctttttgcactcatggtgggggaggttttgggcaaattcaaattaatattgcaaaagaatgccagaaatcaacagtccttcctggttttgaagctatgagtaattttagtgaacagcaggttaaaaactggattgagcaaattggtttatagaataaaaagaacttatagttatttacatatctgcgtcagatatagtgttgatgcaataaatcaaaagaatcctattaataattgaataatatttcattagtaaaatgtatcacaaattatttgtagcattgaaaattatatattaataaataaaagcttagaaataatcttgaccctcaccttacaggaggtcttattattataaacgaggtgaagaattatgctatacacggttaaagaagttgcaaaatttacaggagtcactgtaaaagcactacatcattatcataaaataagattactatttccacatgaggtaaatgaagccggctaccgcctttatggtgaaaaagagcttgagcgacttcagcaaatattattttatcgtgagcttgatttttctcttagtgatattaaaaaagcacttgaggatgagccgaatcggttagagtgtttagttaaacaacaggaactgctaattgcgcgcaagcagaggactgatcgtttgctaaagactataaatgaatcaattgtccttggtaagagaggagaaattatggataagtcagcaatgtttaagggattcaacaaagaggaatggaagtatgcactttcaaatcagaaaaactaccttaaaggtaagtatggatatgatatgcctgaggtagatgaagctcaagttaataatatgaatgaggcagctatggaagcacagcagtttatgaactatataaaagatgctctaaaaaatggtgtaaaggctaatgatacaagtgtacaggagacattaaaaaatcatattcaatttttaaatgatcatggtcatagggtggatgcaaaatcatttgtatctcaaacaaagttctttttagatgatgattttcataggagcatgcttgaaaatcaattaacgggactttcttactacctttatacagcagcagaaatgtatgcttctttaaatcagtaaatacttataggtagtatatttaaattagcacaaatattttatagtaggtgagcttatttagaatagaattttataaaaccattgtattctaatatggtttaccataaatattgttcagaatatttattcttaacaatatctattctgaagaatattaccatatatattcttcagaatatgcttaaataatgagggtttgaaggctataccttcatagtgtttttatttcaattgtataattagccataaatctaatggtataaaaaataattcgacctataagccatactgttaaaaattaattactgagaatttaaaagatgattatttgttacactaataaaacttttaagtaaaggattgatttttaaattcttattgattacaaacttaatttctaattcagtaaattcatcttttaaatcataaatgaaaaaattatgatttttaggcaaaatactttttggtaaaagtgatatgccaagaccttcatctatgcccctaaggatagattctagtgaatcaaattcaataatggcagtagccttagagttgttataactcagccattttcgtaagagcttacgataagggcaatcagcatctgaatttactattataggagtttgtaaatcactaatagaatcaatgcttatagaagatactaatgcaagcttttctttaaaggtaataactttttttatttttgaggatgtaatttcatcagatataaaagccccatctaattcattctttaaaatcatatctagaagatttttctgagtttctgtttttaaggttaaagatacttcgggatttttctcatggaataaataaaataatttaggtaaaacagatgcagaaatagtctgagtagcacctattttaatagtagaagaaattttaggagtaaggaactcgctattaacttcatcaattaattcaagaattttatctgcatacttaagcaatttttctccattaggtgtaattacagttcctttattgtttcttataaataaagtagtgtttaatttattctccagtaatttaattcgtgcagttatatttgattgagcataaccaagtcttaaagcagcttttgatatagatttttcataagcaactatctgaaatattcttagatcattaatttccatagtatagaaacctttcgttaaaattaatttacatgtgccatcactattagtgatattaaagattatttataagtattatacaatttttataatgggagttaaactgtaagtgtaaaaggaaaggcacgagctgagcaataattttatttaagaattaaaaataaaattaaaagggaggataaaaagaaatgatagcaactcaatataagattatattacctagcgattataatatgagcataataaaggatagagtaaaaaacaacggatataaaacagatggatttgaagatttaaagtttaaattatatctaacaacagaaaaaggaaaaaatgagaatttgcaaaatagctactgtcctttatatgtttggaaagatagtaatggattaaataaatttttgtttaagggcttttatgacaatataataacttcttttggatggcagaaagtaaatgtaggaataccattaattgatacaacaacatataaaatcaaagatagtaaatatgtatttgagatagaaagagaaataaaacctcagggaagccttaataattttaaagatgaaatagaaaaaaatattccaagtattaaagaaagtgaattcatagttatttataatcctgataaatggaaatatcatatgtttttcttcatagatgatttaagcaagataagattattagaaggaacaacttatgatatacttcacatatcacaagaaaaaatataaatgcaagttcgtttagaataatcagtcgggaattttatttcttttcaataaggtatatggagctgtatgaaagtcatgtttcagaataaaccttcattttttattttggaaagtataaaaactttctatttttaaagtcatttatatcaatgattacgaggatgctagcttgtaaaaacatgattaagaatgagcgtgatgtagctactttattttttataaattgattgttttagaacaaacgttctgataaaatgtttttatagttcactgtataattaagaaaattaataaactctaagattagaaaataaaggactgattgttatgaaaaaagatgaagaaaatccagaatactttgctaagcataataagaaaatggatgatagtgacatcctaccatcaatagaatttcttgaaaatatagcctgcgagtacaacagtgatggcaccgagagaaactttgctgaaaagctggaggcatgcagacgtgagaaatacagatctgctgatgtatcagccatcacaggtgaaagagtgcatattgattctgaaaagttagatagagttccagaaggcaggttcgatacagaggttgatggtgcacattttgaatgcttttatcaagcaagcgaatacaattatctttacgttgtgctcgataccatgcgcgatgataagacaattgcaaaaggtccacttccacgttttcataagtggtcatggtctacgtttctgaagggacatttgttaagtattgaagacccgatgtactttgaatctgacatctctgttggatggttttatggaacgaaagaacgagattaccgcgatgctacggcaaagcttgttatgagagtggcaaaacgcctatgcatacctaatgagcatatcattttttattcagtctcatcaggaggaacatctggtttatttactgctgaaaaaatatctggtagcgttgcaatagcatcgaatccacaacttgatcttacgcgttttattccaagtgcacttgctaattttaaagaatgtactggtattgatcttgcctatgaaaaggaatatggagatgcagggcgtgtggattttactcatgttttatctagaaatagcttttctaaatacttagttattataaattgtcgctcaaagatagactttaatgatcagctcattccattctgtaaagagcttggtataacccctcattatggtttgcaaaaggtaggaaacttaattatatgggtaatagatgccccaggtccgcatccgcatctatattatgaaagtaagacaatgtatttcgccattgatttccttgcaaaaacattagcagaaggtggcgatatagataggcttaaatcactatatataatgtttagcgagttctggcatgagaaggcaggactgattgcaggagatcctgaatgtttagctgacgctgatccagtaggaaagtcgtttgctgaacaattgaaaagataatagttgtcaaattaaataagctacaggtctaaatatcgcaaattcattattaatgatgaatttgcgatattttttgtttaataaatactattacagataccctaattaagacctgaacttatgtatatgactcgccgaaataaggattatgctattgctccagtttctaaggaaattatgatggatgattctaagatcacaagttgcgtccaatatgctagcctcaaaggcaagctttgaactagcatacttggaacaacttttaatctaagaatcaaaaccatcaaattcctaatgaaacatttcacaaaagcagaattcttatttctagttacaatacatttcatagtataaatctaacttataattaggttatctatatatagttccgcaatgaaatttgcacttatgcgtatacctaaccgaaatgaatacgtatttgttccatatgactatgaaaattttactgaaaagttctatataaaaagaatgaagtttttatataaagtagaaatatttctttgaaaattaaatattaaatacttacaaaatatactataattaataaaggatggcaaatgattgcgcaatgtattgttggaggaaacaagatggagtatatgggaaatagagaatactgggataataaatttgctaatagaagtggtaatccactaaatccagaaaaatcggtaactgaaaatattacatatttcaaaaaaggatctgttcttgatatagcatgtggagatggtagaaatactttatttttacttgaaaatggattcgaagtaacaggtgttgattttagtagtaaagctcttgataggcttaagacatttgctaaaagaaataattatttagttaatacaaagcaagttgacttaagtgtatctaattctttaaaggatattggaatatttgataatatcttaatcaatcattacaggttaagtaaagagcagattggagacttagaaaatcatataactgataatgggattttatttgtttgtggttttgggcataagcataagattgattctaaaattagaaaagaggatcttattaagccagctgattttgaaaatttaaagagatcctttgagctaattgaaaatatagaaaatgaagatgatagaggattttttgtcacttatattttccgtaaaagatcagcgtaagacacaatatataaatagagctaaatcattatttaaccaatttgatgtagtaaattatgcagatgttttctaaagagttgaatgatatatgtttgtataatattttatattttgaatttaaaagtaaaatgtgaaagtaatataggtaatttgttctaattatgggcaacttgatagcaataatattaagattatcatttgtataaaagaggtaactatgactgttaagaattttataagaaaagatcctgaaaaagtatatattattactgttcttttaattacatggattattacaattatgttgtttattaatcctaatataggtaaaaatgattttgctttaatcatgttcattcctgcaatattagctattatctttaataagattacaaatgaccatcaagcaaatttatttaaagacacaactttaaaatcagtgttgtttggaattttctaccctattgattttatagggatttgctcatttatagctcaacttactggtatcggaaatatcagtataaacaaggaattcacattcaaaagtattataattctaatagtgtctgtagttgtcggattattcttagctttgggagaagaatatggatggaggggatatctacttcctagattaacaaaagagtatggtaaaacgaaagcaactataattgtgggtgtagtatggggattgtatcacattcctgctgtttttcttttggcaaaagcaactggaataggtaatccattattcttatgtgttattcaagcatttgctgcctttacatatagttttccttcatcttattgttactattcttcaaggagtttattaccagtattatttctgcactctgtgtggaatgtggttaatcctttgatgcttggtgatatttatacaaacacatctgggatgataagtggagatataataaaaataaatggagagggtgtacttggatgtattttaggtgcaatgatgattttatattttgtaaggcaatttagaaaagaatataaagagaaatattagtggcatttcggcaaatgaagcagatgcaaaagctatagatacaattcaaaaaacaggtaattggggatatattgaaaaatacataccacatatgtctgctgatgggattaaacaggttgtagatatatataactctaaacattcaaacccatctgagcataagaatgcatcagattatataaagaactaaatttaattgggaaaataacccgaaagggggaaatgcaattaagaggaaatatttaattatagcaagtatactagctgttctaactggtatagcatatattttatttccagagaaatatctttttgtaaaaagtacaaatttgaaagatgatagtttggctggagtttgcttaatggaacaagttgatatacaggctttagaagagaaatttggaaaattgacaaatgataatattaataaaaatggattaagaggtttagaatttgataattatccgtattatgcatatttccaaatagataaagataatgaagttgcttggatatcagttggatatcctaataagtcagatgatacaaaatttgtaacaagtagaggcataggctcagagtctaaattttcagatgtattaaaggcttatggtgataattatgcaaaaaaaacttattcagattttatgggtagcggtgatggatatgatgtcacatatattgataaggagcaaaagacttcaattgaatttgagtttaatgaaagtgatccttattcaaataaaaaggaagaatttcttcactatattactctaaaaaaacttataaattaatgggataagaaatacgtttcaatggaaaaaggaacaatgaggtgatatatgagtgctatatgataatatgtatataaaggaaatacgtctcaagaaagaaattcataaagatgatagctatattaaagagttacctgtagttaataacttaaccagcttagacatatcaagaaatgtaaaattttttgttggtgaaaatggtagcgggaaatcaacattattggaagctattgctgttaatagtggatttaatgcagaaggaggaactaaaaacttttgtttttcatcaagagaaacacattcagatttatataaatatattactgtagttaaaggtgtgcagaggcctcgcgatggtttctttctaagggcggaaagtttttataatgtagctacagaaatagagaaacttgatttagaaagctctgggggagttcctgttataaagagttatgggggtacatcattacataagatgtcacatggtgaaagcttcattacactaatgacaaatcgttttagtggaaatggattatatatcttggatgaaccagaagctgcattatcacctctaaaacaaatggctatgcttactattattaatgaactagtaaagaaaagatcacaatttattattgcaactcattcaccaatattaatggcatacccaggtgcagatatatttgttattgatgatgatggaattacgaaaactccttataaaaagactgataactatatgataacaagaaagtttttagaaaatcctgaaaagatgatgggttatttatttgaatagattacatagtagaactaaatagcgtattagtaatataaattagggggatgggaaagatggataaacaatattttataaaaaccgcagaagactttgttgagaattcacaagataactatataacaaaggaaatagctatttcagaaaatgttgtaggaatgaaaatttttgatgctccaattctggcatttggttctgttgatgatgagtactttacattattgaaacaaccatcagcaattggaaaacacttcatgcttccaaaagagtggttaccacaatcaaaaactgtgatatcatttttcttaccatttagcgaagcggttaaaaaaggaaatagaaggaacatgtcatggccttctgaagaatggcttcatggacgtattgaaggtcagagtttattaaataagttgtgtatgcatttaaagtctgagttgattaatgcaggatataacagtgtcgtacctactttagatgaaagattctggtcaaatgctaatcatccaaatcatgaagaaaaatttacaagcaactggtctgaaagacatgctgcttttgtatgcggacttggaacattcggactttctaaaggtcttataacaaagaaaggtatatcaggaagacttggcagcattatcacagaattatacttatcacctgataagagagaatacgaaaatatatatgagtactgttcaatgtgtggtaaatgcgtaaaaaattgtccagctaatgcaatatccatagaaaatgggaagaatcatattatatgttctgaatttttggacaaaacaatggaaaaacataagccaagatatggctgtggaaagtgtcagatagatgtaccttgtgaatctagaatacctaaacagcataatgtaaaatgaatattatatttatattaatttttggcaggagcaacgttacaattaatttgctttgatgattttattccatctatatgttttcctgaatttttaaattaccttaatatgtattcagttatttactgggaaatacaattaatagttttactatatattatctttaatttctagctatgagtactctggaatttgaatattgatcgatgacaagctacttgtatcaagatatttaaagcaagttccaattgctggagttggtgtgtataaacagataggagatttacggtcaaattcagctctttgggcttcaacacagaactttgatacattaggttctggggttgcattgaggaatgaaacaagcgaaagttttgaaggaaattataaggttaggtactttataaaagaatattaatctcctttttttgatctaaaaattataagaaaggatcaaagtgatgatttatatgacttaagttggtccgtaaataatcaagttcaattacatgaaattggtacaactcatgatagacagatgcttttggcatatggtgaaataaattttgaatatgaagtagttattttaaatatcgataatcaaggtaaattaagtggaaaatgtgcttctgtaagaaatagtagtgttaatgaagaaatatatattagataatatgccaaaatattattatttaggaggttaaatttacatatttctttatgcacaatatgtagaattgacatagtaaaaagtgggtaccaatctttaattcagtattatacataatatgaaatatgttataacttatttgtgaaaaaacatgaatatttatgtagtcttgtcattaaattcaggaaggaatatttagaatgaaaaaaattactaatattatgttaacttgtatgatatgcatgcagatgattgggtgtaataatcaaaatgcaaatctaaatgataaattagttgataataaagagagtttaacaaattcgtctactagtgacaattttacaataaaagctgttgactatagcgaagcctttagtggtattcaagggtgtgcgatatttttaaatgataataaaaaagaatatcaaatttataatgaagaagcatgtcaaaaagaggtatcaccatgttcaacatttaagataatttcaacattaatcggtcttaagaaaggtatactaacttctgctgaaacaaaaatgaattataatggaactaaatatcctatagatgattggaatagagatttgaacctaaaagaggcttttcaagcatcctgtatttggtattttagatctgttatagataaagttggccaagatagcatgcaagaagaaattaataaaattcattatggaaactgtgatataagtgaatggagaggtagaagtattaattcctttccagaattaaatggtttttggttagagtcttccttgaaaatttcacctaaagaacaagtaaagattttatcaaatatttttgatggcaaaactgatttttctaacgaaaatattgaaatacttaaagaaataatgttagtagataaaattaataatgtttttgtatatggtaaaacgggtacaggaggcgaagataatgcctggtttgttggaatgattgaaaagggagatgaaaagtattcatttgcagttcatttaaataaaggtaagggaaatgaaatttcaggacaaaaggcaaaagaaattgcatttaagattataaaccaatattacaaataagtataagttttataagatgaaaatgaatagcagatttagtataaaagtaatcaagagcaaaagcgtagtatgtaattttattatacaattttaaaattttacgtagtaaattacagtgatattttttgaaaattaagtaatactacctttacaaaatatattacaatcagtgaagaattagggatttgagcaggatttttagccaagagtgaattttcacttataatatatatgaataaagaaaggtgtgaatactataaataacttttttaagccaatgctaacttgtataagtaaattaagtctatttataggaaacttattaatgagtataatcgtctttttctatatgtcttttttgcatgacttaagtcaattatcggcaggggtttcactatggcatagtactgttttagagatgagtacactagcgattattagttttattggaactatattaggttttatcacaaaacgcaatcacatgaaaaagatttgtacgtgtacaattttgggatatttattatcaattctatctacaaatgcctattaccataaaagaatctactttaactttccaatgcaaatgccggtaggatttatttgtataattccatttattatttcttttcattatattttagatagaaagacattttaaaataataaaaactttttaaggttatttattacaggaatgcttggctttgaactaataatgttaaaataatagtatggaatattaaaagcataattctagttcaaaataattaattcactgacaatggtgagcgagtaagacaagctaaccgcacaattaataatagtaattcattggagagtgataatacatgaaaagtaataagatgtttcgaataatatattctctaactatattcgtgttattttttttaactttctatataggatttgaaattatcaaattgaaacacaatataactagttatattatattagtaattataagtggctgtttgttacagctatgtgtaaaaatatttagtagaagaaataaataatacattttttgaattttggacaaacaaaaaatacatttacagtatatgctataatagaaatatagaggggaaataacttggttgcaatttatatggtaaggggaatgatctttatgaatagcttatttttaggatttgtagcttgctttgtagcatattttataacggactttttttgtcaaaaattaggtatagagagattaataaatagtaaaagacatatgagaattagcttatttctaattgctgcagtatttaatattattggcacattaattattgagaacttttcttcaagagaatatcactttttgcttaaatcttttttggctggagcaactttctactttattgtttttatattgccatttaataataaaaagattaagtaataatatatttacgataactatgaggataaaatccaatatagtgaaataattaaagcttagttttatacaataaataagcatagaattattttagaagtgagatgttccttttaatgtaaacagattaaaattaaagatctgtccacattaaagggagtatttttgtgcctaaaatactaataaacattagaagagtatatatcatatttaaaataaataatgacaaaaaatgatataatttgaaaatctaataataaaattattacaaattatgctataattgattcataatagaaattgagtttaaatttacaggagaatgcaagaggagagcttttttatgaatatagtaagtctaggcgttacgatataaaatgaaaacaattacttatagaactttttcatatacttattatgaattctattgactaacggaactacagtatttgttgtatttaatgacaataaattataatgatctgtattaaaatcaaagaacggtcaataaaattgtatatataagttagattcaaattaactgattaattagtacaagctgttgattttagcatatatgaagataataaatatataatttataacaatttacagtaatttttaaagttaataattaatataatcaagagtaataattttgaaattgaaaagtattatggtgaaaagatatctgaatttaagtgaattgaatactcaatagactttttaaaattaaggaaaattatagttaatttatagtatataaactaactatatcaaaaataaattataataaagagaggaaaagagatgaaagtaaagaagattattttatcaagtttaatattattattactaatgacaattggggtgtatgcagcaggtaagcatatagtagatgatgccaaagttctaaaacaagatactattaatactgttgaagaaaacttagccaaaatagaaaagaatacagatgtaatagttaaatttgatgtagtcaaaacattgaatggaaaaagtattgatgattactcgaaagaatatgcaaagagcaatataagtggagagcaatacattttatttgtaacatcaataggtgataagaaaaataaaattttagttggcgataaggcagatgacattttgtctcaatcagatatatccaatattgttgcattaccaaattcagactttaaagctaacaattttgatagtggaattatgaaagttggaaaggcactcgatgaaaaagttacaactaaggcagttaatactggcaaagctgaagtggtaaaggatggttattcaaaaactgtatcccataaaacaaattattttggggtatttgttattataatagttattatattaattgcaataatattatttaaagtcataaaaaataaaatgaataaagattatgaagaaagaaaaaggaaattcgctgaggaaaataatttagaatcatatttagattctgatgataactcatttcattcaggcaatataagtaaaagtgaaacaaaacaaaattattcaagtcatggaaatgactcggattatagaaacaataatgagtcttcttctaattttaataacaataattcagcttttaataataactcaacaaggacatcagataatgcatcaaacaattatgatacatatccttcaggtagccatgtaaataatactactataataaataacaacaatagtaataatgattttctagaaggtatgatcgtaggtgaaatggtatctgaatcttcacgtaaccatcatgaacattatgatgagcattatcatgaagaacatggatatagagatgataacgaacattatagggaaacttcatcatataattctaatagcttggataacaacagttctaaggagtctaactcatcatcagattcaagtagcgattcagtatatttatctggtaattgggattcagataatagtacaagcagttgggactcagatggcgactcaagttcaagctcagaagaatcatcatctagttggggatcagatgacgattcaagttcagattcagatagttcatcatctagttgggattcagatagcgactcgagttcaagttcagatgactcatcatctagctcagattctggatctagtgattggtaaaataagatggacaaaaccaatttattattaagtaaatttaaagcaaaagtaactaatggaattacatcatataaaaattgaatgaggtgatatcagtagaatatgctatggatgcagaatttactgataagtaattacacaaagagttaatttaacatttgtattgtgctaaaattaatttacaattttcagattacaaattataatttaattatatatttaagttttctagggttccgcagtttgtaactggcaggtccgagagaaaacgcatagtttatactatgttcacggaaggataaaagggagtgtcgcaaaatgattaaattttaatcaggagcgatgctccttttcggtttaagccagcaaatctccaaatatttgaaatacaatattaattatttaaagaattctgatttttaagcacact

SEQ ID NO: 114 - DNA, 17710 bp, Clostridium beijerinckii
tcttatatctatatattcaataaatttatttccaataaaaattccatcttcaagaaaatacattttagatacaactttgtcatataaaaatagacataaaataataataaatataagaatacaattacttaacaataagtacaaagaaaagctttctgcaatatttcttattataagaaatacaataaagatatacataaaatatgagtgtttattagagcataaatgtgaatcaattactaaattagcttttttatctccaactaacctacggtaggattggatataatttatcataaaaattaatgaaatgcagaaaaaaacaaggaatagaagaatatctaaatatttaaatattaaaatcataaatcacctcaatctaagtctatttaaattatattatacataaatatatgacaaaaataaacataatagcattatgcttacacgaaaataaaagtatataatcaataaagtttaaagattatatacttttattttatattattaaacactttttaatgcacatctcaaagaaataactggattatatattaaggaaatctgaaaaataaagcttaattaatcttaattttgatttcatttaaagctgaattcatagaatctaaaagatttaatttatcagtaagctccttaattatttcctgatagtttttttctctttcttcctgctttaagtctctggtttcctgtgcttttaatatgtatactataagcacacaactaagtaatgtccagattccttgagtcatagcaagctttataagatcatcatacataatatcatccctccatatataacttagtttttagtagatttaaagaaactcttttagctgtatttacagattgtctagatattttaagaattttaccaatttcaatatctgaaagctgcagatagaatttataataaacaatttgtttttgtctaggttttaatgatgaaattaaatcattaaagaatacatctgaataatcattgctagaattattttcattaaatgattctaatgattcatcatcacaattaaaggtgaggagattattatcacgattgactttatatgataatctaattgcttgatttctaagacatctttttatatacattgaagcatctgcaccagaaacaaatttatcaaaatttatctttgtaattaattcataaagaaatatgataaggtctgtttcagcttcgggatattttagtttatagattaggtattttatctttgaattaaaataagataagatttccataaaattatttttatttttctgaaaaattataagtttttctaataagtctatatccatattctaacctccaagcgatttatttaggcttgcttatttcctattaaataaagttaatgtcatgacatatattaattttaacggttatattgataaaatgaaactggcgatatcatagaaactgaattatattatgagatagtatatatgagacttatgttttcatctgttatcttaaatttgctaaaaagattatctgtaataatgataaaatagttgaaattcaaaaaataatatcagatattgaactagatgaattttcattaatctttctagtttactataataagtttatagtcagttaaataactgctatagaattaactgattatgcggctaaaaagaaaataccttatcataaagttattagaaagaaaaatgttgacctaaagatagaattgtggagagataaaaataacctgcagagattctgaaggttatttctataatgtacactttataatattattacaaaagcgcatttacaatttagagtaaatataaaaattgtaagccgtgtatgtttatgttaaaatatgttcgtattaaaatacaacaagttaatccaataaggagaataaaattgaaaaagataaaaattattttatcagtagcagctatattagtaacattaagtggttgtggaaatcaaaaaccacaaaataatgctaaccaaaccaataatgatacaactactgaggctattacagatactagtgataatactactagtaacagtgattcaaaaaatacagataataatactgaaacaaataatactgctagctcatctactgatagcaaagatacaaatattgcagtggagaaaaacaataatagcacgaataataattctagttcacaaaacaatgataaagaaactagtaatgatgaaaaatcattttatggtaattgggaaatcaaaaaagtagcaggatatgcaaaggtatctgttggtgaaaaaacatcactaataggtttaaagattagtttgtcaaataacttagcgacctttggtaatgaatcttataataatccacaatataagatgataaacaaaactcaaaataatatggcgagtgagtataagaccaatctttcaaaaataggtgttagtactgattctattatgcaattaaatgtatcagataaaataactttattcatcaaggacaataatactttactttattttgatgaaggtgtattttatgaggttaaaagagaatagtaaaatataaagataaaagaggtaatctgcaaaaatgtaaattacctcttttatctttgtatatatttttcaatgataaatctacatctaaaattctagttagccaagtgatgagttaaggccaaaatccctatctatttgagtttgtaaactttgtttatatatgttttttcaatgtataattctattcctaattgatttttgttataattaactaacaataagttgtaaataaaaatttatatgttttttaaggagatactatttatgaagaaatatgatacagttatatttgatttggatggaacgcttcttgacactcttgaagatcttgctgatagtgtgaattttgcattagtaaaatataattttccatctagaaaaaaggaagaagttagaagctttgtaggaaacggagttgggcgtttaatggagctttctgtgcctgatggtttaaataatgcttattataaagaatgtcttgcagattttcggagtcattattcaaaaaatatgcaaaataaaactaaagcatatgaaggaatcatggggcttttagatgttttatcaaaggaaaactataagcttgcaattgtttctaataaatttgatgcagcagtaaaagagcttaataagatttattttgaacaatatataaaagttgcaattggagaaagttcaaatattgctaaaaaaccagcccctgatacagtgattaaagctttaaaggaattagattctactactgataaggcaatatatgtaggggattcagaagtagatgtaaagacagctagaaattctggagttaaatgtgtaggcgtgacctggggatttagagatagagagcttctaaaggaaaaaggtgctgattacattatagacaagccatgtgagttgctcgagataattggtaattctgagaactgaaaatgaagaatctaactttaagagtagttttttaatacagagatatggaatataattaaaattgaatttaagataaatatataaattttagttagcaaaaagtatatttaacataaatacatgtagtttttggcaagaataaaaaacggttgaatcataaaaaatatttttaaatataaaattatgttatgaggaagtgtaaattatggttaatgaatattgtcctaaatgtcatgcattagaatacgtatagttcaatttcttacaatattattttgatattgttgaaatggaaacaaaagagtaatataatattgttaatgcgtcaaaaagtgggaggataggccatgaacaaacaagaacaggtcttaatggattttaggaaagtatttaataagatggcttggcttaataaacttaagatggaagatagtcttaagggatataatccctcggaagtacattacattgaatgtattggaagaaacgtagagtccaacgtgacaaaacttgcagagtctctttatatgactaggggagctataagtaaaatgacaaagaagcttatacaaagaggcattatagaaagctatcagaaaccagataataagaaagaaatctattttaggctcactgaacaagggcaaaaagtttatgacctccatgaaaagctgcataaagagtttcaagatcgagataaagtcgtatttgaacaagtgactgatgaacaatttgacgctatgcttggcttcatagaaaaatatagcaggcatttggacgcagaaataaataaacttggaatagatactaagtccgataaatctgaataattaaaataaaactataagcagcctaattccacttggaataggctgtatttttttctttcaaattatagataaacagatttatgggatattccaccgaaagcagaaacattgttatttcgcagggctatgaaaatatcgctgaaagctctaaattgcaggttgcatcactaatgcttgctcccaatttcattgtgacaagcattagtggaacaacctacaattaagaacttttagcagcttattttcaaatgcctgctgcataaaaatgtttctgctttctattttgtatatatttaatagtgtaaatctagcttacaatgaggcaatgaaagacaaaaaagtattattaatttggggatattgtacacttttataggttagtcattctgaaaagttgttataaggctattagaagagcttctggtgttttactcttcttgacaaagaatttgtacaaaaatatgaggactttttcagtggtctcattataattgatttatctatatagatataaaaactataaattagatttatatctagaatgattatctgccattgttaaaattttgtgtgggcctataccagaaattttataatccctttgtaataaaattgtatgtaacgtagtcttactaacgtaataccagtaaaaatatgtaattttaggtaaattataatatttaaagtgaaattaactataagttaactggtatttaaaataaaaggagtaactttatataagaacaaaatatttagaaggtggtaagattatatgaaaattagtaaaaaagttaaattcattcttccaattgctgtagctacagtcatggctacgtctgtcagtataccttttataaggaacgttaatgctgaaattacaggtacatcaggtattgagaatttttcattacctaaggttacaggaccttataatattaatgcaaatgttggttctgacccaaaagagcttgattttgcttggttcacacaatcttctggaaagacacaaataaaaatttcacgtacatctaatatgaatggtacagaatttccaacttctgcagatattcaggatgctgaacaaactgttgtaaaagctacacaatctattaatcagagtgaggcagcccttacagatattgatggaaaggctactcctgctaataatggggatgatgtttataatgggaagaaaacagcaggtgctccaactggcgaatattcaaataaagtgaaagtaaaagggttagatccagatacacaatactcttattctgtaagtgatggacaaggcaattggagtccagtttatacaattactacactacctacagataaagtaacgtttgctgcttttggtgatccacaaattggtgcatttgataattctaaaggtactgctaaatctaatgctacaggtggtcacaagaacttaaatgatgataaaacaggctggaataatatgctgaaactagtgactcaaaataaggacttaaacttccttttttcaatgggagatcaaattaacgactataattacttagttcaaccctcaaattcatctgatggacaatggtatcaatatagggacttctttaatcctgattctacagtgaattacatgcaaaatatgcctttagctgctttttgtggcaatcatgatcatcaaatgggtgaatattatggctatcactacaatcagcctaatataagtaagttaggtgctacacaatatggaaatgatggtgactattggtttactgctggtccagtattatttttggtattgaatgcaaataactatggtactgctgatcatgatcaatttatagcagaggctattaaagctaatccaaatgtaaagtggaaggttgctacatggcaccaatctgcatacagtgaagctaatcacaatactaaaaatgaacttgatgatccagttttaacaatacgtaatacttggacaaaaatgatggataaatacaatatagatgttgtactacaaggacatgatcactactatactcgtactgcacaaatgttaaatggaagtgctgttgatcctaatagtggtgctcctgaaactttgaaaaatagtagcaacgcttctgtaccaggtaccacaaatccaaatgctacttatgcaaaaaaagaatatccagacagtgtaactaatcctaagggaacagtttactttactcttgattcaggtacaggaagtaaatattatgacttcaacaatggtaataatgatacaattggcggaagtgctgaccattcatttagtgttgttggatggcaggggtatgttccatcgtactcatatgtaagtttcactgatgatacatttacaatcaagacttatgcagcaaatgattatacaattggtaatcaatcattaattgatagctacactattacaaagaaataataaataagcataacttagtaaaagacaaaagttcagttaatattgactggactgtttgtcatataaaattaaactgctttttataaggcagtatagaagtaggagaatagcatgaatattatgaatataaaattaggttggatttcatctattaaaatagggggcaaaattattggatctattgccattttgtctgtttacattatactggctatactttttagctcacatacgcctatttataatccatttagttcaggagctggtggagaagtacattatgaaaagggtaaggttgtctcaattgatgaacaggtaataaattcatcagggttttctgggctttacattggaagacaaattgtagatgtacttatagaaagtgggcaatataaaggacagacttttaaggttaataatgcccttaattatgatactaattttattcttcataatggacaggatattgtggtgtctgttaatacatctactgatgataaatcatacgtaaatgtttatatgtttgcaccatatcgtgttgttcctttacttgtacttataggtctttttattggagcaatctgcttagtaggtggatggcgcggttttcattctgtgctagggataatatttaccttgaccacggtattatttatttttgttccattacttttcatgggtgtatctgatgtcttggcaactatattacttgtcattgtaacttcttgcgtaaccctctttttagtaggtggctttgatagaaaaactttgtctgccgtattaggaacagtggcaggtgttgttgtatcagttgtaattatgcttatttttagtaggattctaggaatatctggttatacatcttcagatacagatgcattgcttaacattgctggacaaagcaagctgcaggtgaaagatcttttatttacaggtattattattgcttcacttggagctgtaatggatattgctatttccattgctacctcaatcaatgaactaaagaagcaaaatcaggaggcttcctttagtgaattattcagttcaggtatgaatattggacgagatatgatggggactatgagtaatactcttatcctagcattcctaggtgaatccattttctcttttattttaatgtactcctatcaagtacagtttaggcaattgattaactcaaacggtgttgcaattgatattcttaattctgtttgcgggagcttagcagttatacttacagttccaattgtatcggctattgcagcaaaactgcttcaaggaaagcaaagttccgttaaagaacaataaactagttctaatgcactttagatacctgaatttatgcatataattcaccgaaatcataaatattttgattccgaaaagctatgaaaatatcgctgaaggttctaagcagcaggttgtatccactttagcatgctccaactttcagtttgacaagctaaaatggaacaatctacagctaagaacctttaacagctcattttcaaatgttttctacacaaatatatttatgatttctagtgaagatatgagctcaaagttttagcaactttgtaaatatgttcatctatatagatatccaacccaaaagatatacctatactttaatctttgtgaattatactagaaattagatacatgtttgtgaaagcggcatttgaaattgagttgtgatagttcttaggtgaaggttgttccattttctgcttgccctaaacttgtttttggagcatgcagaaatgagttcaaccttccacttagaactatccagcgaaaatttcactagtccgctggaacaaatttgtatctaatttcggttttgccacacataaatataattttaaatttggatatctataatgaaacaacaggcagcctaaaaatatttgtaataggctgcatttttattgttgatattttgttgacaggtaaacaaaatgatgttaagatgattttgttgagaggtaaacaaaaaagtatctgctacgaaaggagaatttaaaatgaaatcagaaagtacaaaacaaattatagatataaaagatatgcaaggaggaaaaagtatgaatgtaatcggaattagtgctagttcacgaaaagaagggaatactgcctggatagtaaataaaatactcgaaggtgcgaaagaacaaggtattgaaactcaatactttgattttaataatcttgatatcaaaccatgtcaaggatgttgggcctgccataaaggtgatcaggggtgtgttatcaaagatgatatgcaaaaacttaatgatgcaattgaccgtgcaaatgtcattgtttttggttcgccgatttatatgatgcagatgagtgctcaaggaaagatcatcattgacaggatgtttgcacgattttctccacgatactctccatatttcaaggaagaaaatgcagctgaaaaaagactaattcttacgtttaatcagggaaatccagatccagaactgttcaagtcgtatattgattatactaaacacatgtttgagctgcttgaatttgatgttaaagaggtacctgttgttactggtttgagaaatggaccagttaatgaaagagaagatcttaacattatgttaaaggatataggctcaacaattgtttctcaagggtcaaagaagtaatagatatattagttgcttttgctcattcctcaattttggagggatggtcaaaaatcctaagttattacacggtaataatagttattaatgagacaaaatagcaactactaacaggatgattcactcattttatatcaatccaacttcataaatttttcctaaataacaaatattgataggagggtttaaatgtccaaatttaaatcaaataatgaacaaagttcagaacaaattatagataaacacgctttaatattcggtcttatatctgtatttctttgtggaataggctttacgatcatagcaccagtcgttccatttttagttcagccttatacaagtaatccaggagagcaagctatagttgttacacttcttacatctgtttatgcagtttgtgtgtttttagcagctccaggacttggcgctttgagcgacagatatggacgtcgtccagtactcttagtatgtctcttgggttcagcaatcgggtacgtagtctttggtataggaggagccttatggatactatttgccgggcgtataatagatggtataacaggtggtaccataagcactatttttgcatattttgcagacataattcctagtaatcagagaactaaatactttggatgggtgagcgctattgtaggcgtaggtactgtcattggtccaactctaggtggattacttgctaagtttggttattctgtgccaatgtattttggggcaataataactttactaaatgttgtttatggaatcttttttatgcctgagagtcttcacaatgaagatagactagagaagatcactttcgtgagactaaatccatttacacagcttgcaatcatactttctatgaaaagcataaagatgttacttatatcaggattcttactttggataccaaacggatctctgcaagcagttttttcacaatttacaatagatacttttagctgggagcctacagtaatcggactcatgttttcaattatgggctttcaagatatcatttcacagagccttataatgccaaagcttttactaaagcttaatgataaacaaatagcgatcctcggcatgggttcggagattatgggatatgcttttattgctctatcggctttgttatcattttatcctctatttatcattggaatgtttatatttggttttggtgattcaatatttgggccttcatttaatgggatgctttccaagtctgtggattccagtgaacaaggaaggattcaaggaggcagtcaatctattcaggctttagcaagaatgattggacctatcattggtggacaaatctatgtatcacttggtcattcagcacctgcttttatggggatactccttatagcattggcaataccagttttatataatagaacccatgtaaatatataaaatatatatgttgcaaaaataattcttcatcataattctaaaaatattacaagaattttatctgtaattgtgaattgtgaaatgtgcattgtgaattgtaacatatatacatactttattctcaggcgagtatcaattttcattttggattgtaaggaatataaaaatgataaaaagtccatgtcgcctgagattttggtataaggcaaggagatgaattgccctcatattatatagaatctgacagcttacattaaatatgtaggctgttttttttagaaatttatattccaataaaatctatggatgaggtactccttgagtgtataacttaaaaaaggttgattgactagtttttgtattttaaaaagaataaaaaagaaatctacacctatgaaaagagcgcgaagcacaatacggaacttaaatatatttgcctgcgattttgttctttgcttcaagagtataaaatttttgaattttaaaagacaattatataaatggttaagtggaagaggtttgtaaaaataaatatgattaaagaattaataagggctagagaatatctaacccttattaattttacatatttatcatatatactgataaattaattaggaagattaagggaaaaagagaaaatataagcataactgatataattgataaaaatatcattattgacgatagaaacggatttttgttttatcggaaaaactgataaaatataagtatagtaagacagacaagcagttgagaaagtcgattgaatgggggagaatatatgaaattaacaccaataagattaaggagattaaactctggtcttgatagtgaggaggttatagaagcattaaaaataagtaaaagtacattttataagttagagcaaggatggacaaggccatcgcctgcactgataaaaagacttgcagatatttataaatgctcaacagatgacatatttagagatttaaagataacagggtagataataaaagattcatcaaaatttatgagtgcattataagaggtgaaaaacaaaagttatcgagatagatattttatgtcagggggaattcaaattgttaattaagtgtaactggagaacctgtaaaaattataaagatggagtatgcagagcagattctattgaattaaagagctttgattacgaagaagataatgaagagttagaaggtttaaaatgtgccacatatgaatatgattccttttggatgtgcgataagggaagagaagtagatgtaagatgatatataaaaaaatacgaaagctataagatggtataggagttgataagatgagcgagggctggtttaagattcatagagttttatttgaaaaggctatttggttaaattcaactttagagcagaaggttatattgattacgattctaagtatggcaaatcatgaaaaaagggagtgggaatggaaaggaacaaagtttaaagcagaagcaggtcaatttgtaacttcattagagggaatagttaataaaagtggtgatggtatatcacttcaaaatgtaagaactgcccttaagaaatttgaaagatatgattttttaacacaagaggtaacaaagactggaagacttataaagatagtaaactgggaactttaccaaggaaagcaagataaaaatagcaggcattctaacagtgaattaacaagtatctcacaaacagctgacaaagaggtaacaactaacaagaataataaaaattataagaattataagaatactatatttatagaagagttcactaaaaataagcttctaattgaaagtatatcagaatttataaaaatgagagaaagaattaaaaagccagtaacagataaagcactaaaaatattgctaaataaattaaaagatttatctcaagatgaggagatacaaattaaaattttagaaaacagcatagagaattgttggcagggattatatccattgaaggaggaaacgcatatttatggaggcacttcaaagaatattagatcaagtgagagaaaattcaatatcaaaatcccagaacggaaaccaaaagcaagtgcaggctgcacaagagacaggccattttaaatgtgaaaaatgcaaggatacaggttatattataaaagctcaatttcatgcacagccactgatgacaccatgttcgtgtttagagattgaaaatgtcaaaaggttatggaaaaatagtgggataaacccagaaaatttagaaaagacctttagtaattttgaagaatggtcaagaacttctaaaaaaatgaaatttattgcaacagagtattacatgagttttgatgagataagatcaaataggaaaaattcaattttactttgtggtaatccaggaagcggaaagactcatattgccttagctcttgcaaataactttttgaaaaataatataaaagttgtttacatgccttatagagatgtaattacaagccttaaacaaaatatcctagataaagaatattataaaaagaccttaagcaaatatcaaacctgcgaaattctattaattgatgatttatataaaggaaaagttaatgaaacagacataaatataatgtttgaactgataaattataggtattttaatcacttgccagttattgtttcaagtgagttcacagttgaaagactgctaaattttgatgaagcaataggaagcagaatatatgaaatgaccaaggattttatagttgaaattcaaggcacggaaaataattatagactgaggtgagaatatgtcaaatatacactggtgcatatgcttaaaaagcagcaatatgccaggaaaaataatttttaaaaaacatgctgaatttggggataagataaataaaatcttagagaataaaagtgctgagttaatgggggaagaggttttgaaaaatgaatatagcggtgcaaatggaaccaaagatttagagtgtgaaaaagattttgcattcataaaggaagttaatgatttagattatgaaaataatgaaataagcaaaaatagtgaaggtaccaagagtaaagttttaattaataaagttgaggggagaaataatatggattcaaaaggaattatacaaagattaaatacatgcatcatagcattaaacaggagcaatacacagttaaaaactttggggcttaaaaaggctcaagcagagaaagaatataaagtaaaacaggctgaggaaatattaaaacttagggaagataaatatccagctaccttaataatggaattagtcaaaggaaataaagatgtagcagaattaagacttcaaagagatgtagcagaaaatgcttattttacatgcttagatggaatagataatttaagaatagaaatagaattgataaagaataaattaaaatggcttagagctgaacttaatagtctataaaagagacttacatggtgattttatttattaatgtttaggttagatgcaaacttcataaaagtagaagatgataaatagttttatttatagataatccaactaacacctgaatttatgcatataactcgccgaaatgaataacatacttttgttccagtttctgggtaattataatgggggattctaaggctataaagttgcacccaaagtgctagcctcaaagaacaagctttgaactagcacatttggaacaacttatagccaaagaatcacatccatcaaaattaccaatgaaacattccacaaaagtatattactcatttctagttgggatatatttcatagcataaatctaacttataattgtgttatctataaatcatagtgtgaatataaaacttgattaaattgagatctattttgtggagatgtataaggaaactttgaaagattagtaagtaagaaggctaatgagtaaggaggagtgatatatatgaatatcactctgcaaacaaggaattgggaatgattacaattaaatcataacatataaatgcatcattgtaatggtttttaataaccaaaattgtggcatcattccccatttctcttgagctaaattaatctagccatatatgttgaaataatatagtgttcaaaatcaaatttatataagtatcagccgaaattgaatacatatttgttctataggactatgaaaatttcgctgaaatgttctaaatgaaaggttgcgcttattactgcatgttcccaccttcaatgtgacaagcagtaagtggaacaacctcccattaagaatctaagcagttttattttcgaatgcctgaattcatatcatgaactttgaggttacaaacatgtaccaaatttctgtgtttatgatatatatattgcaaaaataattcttcagcataattctaaaaatattaaaagaattttagctgtaattgtgaatcgtgaaatgtgcagtgtgaattgcaacatatatatatcaaattttcaatgtggagacttattatatacaaaatggattttaattatttttagaaatttagaaactaggggtggttaatatgaacagtacaatagataaagtaagaagatatagagagattttagcagacatacaagatatagaaataagagttcaggagcttgaggaagaaatcataggaataagtggaatagagatgggagaaagaacaggaaaaacttataagattacttcaagtgtggagcagcaagcagaaaagttaatggaaagaaaagaagatttatataaggagcaagcaaataagaaaagagaattaaaaaggatagaaaatgcgcttactatattgacagaagaagaaagcgacattataaaaattgttcatatagaacatagaaaatattatgtcgttcaggaaaaattaaagctatcttatcaaaggataaaacagctagaaaagcaggcagctactaagatggaaaagtatatatcataatgattttgggaaaaggtatttcctcggaaatatttgttgtaaaattgaaaacttcaaggggaatgtggcttgtgaatcgcaacatatataataatattataatcaatagtcatattcatgtatataaaatacccaaaatagagtctacagcattttactgtagactctttgatttttcgaagatcttatttcctaaactaactattaatgataagcttattacttcttttcaattattgcagtatattttagttcttttttctcatcattaaattcaaaatttaattttaagttagggggataagtgtagccagacaaatatatttcatatttattagcttcaatttcattcattgttgaatttttttcaattatttgtttatagtattcataagattcttctggcaatgaccaagaagctgaaattctacttgttgtttcaaataaaccgttatattttctgtagaaatagtctatattttcagcatcatctggcactttttcagggaaaaaattcttataaatggcttcatatttacgcatatcattaccaacatgtaagtaattattaggtgaatttgtaaatgaatctaatggaggagttacaaaaactaacataaatccactagccaaacttaacatgatagaaattaataaagctaaaacatttaatataattttccatccgtatgatttaatataattcgtcttacttaaaataatttttcctaagatactgcaaagtaaaggaagcataaacataataaataagatactatatgttttaagccctaaacttccaaaatagaatcttggatattctaaatcataacctattttaatagaaagatatccaacaattatccctaatatattaagaccaataataacagtatatataactttaaatattttttttatggtctcaaatcgtatattctttttagcattcagtaataaatctttctcttggagattagcataagtgtcactataatcataacttttggcctcaacattttctgtagactctttgaaaagttttctacactgtgcacaatcatgtaaatgctcttctacaagaagtttgctttcgggactgcatgtattatcgatgtatgcaggtaacaagtccataattacttcacatttcatattttcatctcctttaggcttttttgtaacattagttttgcacgatgaaatgtaactcttgcccaggtttcatttttaccatattttttacctatctctttataacttaattctaaatatgtcctactaaagaatacggttttgtaaggatcacacatttgcataactatttttaaaatataacttaattcatcttttttaacaaaatcatcttctaaaagattttctgtattaaactccattttttgtatgttttcaatatcaattattttagatgtcttttttaaataatcaaaatataagttttttcctatttgacacagccaaacaatcaatttactttttcctttaaaactttcaattttattaaatgcctttacaaaagtctcttgtgttaagtcttctgctaaatcatagtctttagttaattttagtaagaacttaaatacattcttaacatataattcatatattatttcaaaatctgtttttttcatctgcctccccttttacaatataaatcttaaaatggttattcaaagatttaggtagatttttagtacttatatatatgactattaaaaaaagatttcgttacaaaaaaattaaaaattattattactttaaatatatcattagaattatatcggtaaaacaatttataaataaccagcattaaataaatagattattcacttggagcaaaataaaattaatagaaaaattttagaaatcctaaataa

SEQ ID NO: 115 - DNA, 17394 bp, Clostridium beijerinckii
cttaaatatcatattataagaacgtatttataattattaatatagaatttagaataaatttctttttaaaagtaatcctataaattagatagaattacaggaggttttagaatgaagctattaaaaaaatttataataataattatagtaacagttatagtaatggaaaccttaattgaagcagtcccattaaatagtcacaatgattcaacaaatccagtaaatgtaggagtagttttttatagattcgatgatccttatgttattgatttaaggcatagcctagaagatattgaatcacgaaatgaaggaatagttaaatttaatttttataatagcgaaaataacagagatatacaaaatcaaactattaataatcttctagaaagcggaaatattgatcttctcatattaagtttagtggatttagtaaacgatcctaaagaactaattaattcaatcaaagaaaaaaatattccagtaatttttgctagtaaaagaatacttaaggtagatgaaaatatagttaaatcatatgataaagcatattatatacttccagattcagagcaggcaggcaggctacaaggaaaattattggttaatttatggaatggtaataaaaatactatagatacaaataaagataatattatgcagtatatagtattgcaaggtggaattaatagtaatagtaatgagtcaacagatagaactaaatattgcattatgacaatcagagatgctggaataaaagttgaacaacttgcatcagaattttgtaattggagtgaagagttagctagagatgcgacagatgctttattaactagatatggaaataaaattgaagtagtaatagctaataacgatactatggctgttggtgctgtaaaagctttacaaaagcatggatataataaaggtgctggtacaaaaaatatacccgttgttggaattgatgctattccagaatcactatatttcatacaaaaaggatatatggcaggtactgttttccaggatccagatgttatggcaaatgcattttttgacgttgcaatgcatttatcaggcaaaatacgttttgaatgtcctaaggagtatcgatgtgatgaaagtggaagaataattcaattgccatttaaagaatatatggcttaggataaaagtatatttattggatttaaaaatgatgtcgttttgataatgaattttatttacctcgaagttaataattataaattagtggtaaataaaattcatagttaaaaaattaacaatgcattagttatgaattagaataaacatcataattaattctattattattttaaaagctataagcaaagttttatggacaaagaacaatgaggagcttgtttaatttttcattagaatctactttaaattataaatgaatacaaaccaaataattctatgcgaatgaatcaagttacttagcgttcatatttaataatttcaacatagaatacttgtaaaaaaatacatttatagtataatgtgtacatgcaatattaaaagagaattgatctatatattgtaattaaatttctatatttggggtttttatttagcatgagagttctaggatttaaaatattcagcatatatatgggggaatgtacatggagataacagtattgatagcattttttcagttattgcagttgtaatatttcagacggttttcacaataattgaaacaagagctgagagtagatgactctgaacaaatattttatatagttgagtagatgtaaagaagaatatttgcaaataattgtacgctaataaataaggagttatattatgggattaattggaattttacctgtgtttgcattaattatagctggaattatatattttgcagtgaaagtattggaacgtttattaaataaaaacataatgggatatgtaattttattattaataattgcttttatagctatttatggacttttatatttttcagaagatgatggatgtggtggaggagcaatatttttacttctatctacctttgcaatagatttctttataattacttttttcataattgaaaagttatataagaaattaagagcacggttacgataaatttaggtgaattgtggacaagaaatacattcattagaaagggagttgaattaacgtggatagaaagataaaaatttttattgcaggtgattctacagctgctacaaaattaccggatgaaaaaccagaaacaggatggggagaaagaattggagaattttttactagtgatatagaaatttgtaattttgctatcaatggaagaagttctaaaagctttataaatgaaggaatattacaaaagatatctgaattaattaaggcggatgattttttatttatagaatttggccataatgataaaaaagaaaatgaggaattatatacagatccatttactacatataaagcttatttaactgaatatattaaagttgctagaaatgctggtgcgcacccagtattactaacatctatacatagaagaaattttgatgaaaatggcattataaaagatacacatggagattatcttgtagcagtaagagatcttgcggctgaattaagcgtaccattaatagatatgggtgaaaaaagtaagcgtttatttgagcaaataggaatagaaaaaactaaagagatattcttatgggtgaaaccaggtgaaaatctcaatcatcccgatgggattcaagacaatactcactttttggaaaaaggagcaaaggagatagcgagattagtagtagaaggaataaaagaaaatcacatagaatcattgataggatgtatgaaataatcaggtgtattactacgatgcagtcattaataattatcatcataatgtgtgttacttctctaaagtatagatgatatgttttattttatgtaatatattgcaattcacaatgcacagttcaaaattacggataaaattattgcaatatttttagaattactatgaagaattatttttacaagatatatatttattttattatgaaaattgctataataatttaaaaattggatgatattcactagaaaaaatcagaaagtagaaaaataattataatgtgtgagaggtgttaaaattgaaaattaacaataaagtattttttatagcaagcattatatttagcggactcacaattatttcaatattttttattcatagtgatatttcatttatatttctggggttttctctattatttggtggtttagatgaaattaacttattaaaaggtatggattcagaagagactaataaaggaagtaagactggcggaataattgcgatagtcgcaggtttatttataataattacttatattgttagattgttatcttagatgaggagtactttcaagttacgtaagatatttgtgattaagtgggatatattatatacaaaggatattgtaataaattttggagtgtttgaagaaaatcaagaatcgtatttattcacaagatttgttataagcattaaagatggttgaataaaagaactaatggaatttaagcacataattccattagttcttctatttgcaaatacaaaattattttttgattgttattattaattatattaaatttctaagccattattgattcggtatcatcatccatagaagttgcttttttgctgtgtaggcaataatataagaaaatgcagagaactgcaactgctgccatcatcatatataaaccacgatatcctatcaatgggacaaagtaacctaagataaatggtccaataccaacccctaaatcttgaaatataaaattagtagaagtagctaatcctattcgatgttttggtgaaacctttattgcaattgcttgtacactagatgaagttgtaccataaccaagacctaatatagcagcagctaataaaagagttaagcttccatgagtttgactaaggaaaaataaagataaggcaaacaatgctattgctggatacataacaaaattctcaccttttttatcaaacatttgtccagtaaaaggtcttgaaagcaaaacaaatactgcataaacgataaagaagagacttccaacgctcattaaattaatttctttagaataagagctaataaaagtaagtatgcttgaataaccaagagcaattactccagcaataattgaaataggaatagcttttatttcaaagaaattatgcaaagaaaaatctttattattatttgaatgcccttttacaatttctaactttggaatttttataaaaaagacagcaaaaaaactaagtattaagaaaataatacatacaacaaaattcatataaaagtttgaatgctcagtaataaacatacctaagaaaggtccaattgcagcagcaatagtaagacttaatgcataataaccagtaccttctccacgacgttcatttggaattatctttgctacaatagttccagttgctgttgaagcaattcccattgcagcaccatttaagaaacgattaatgaataagaataccatactattcactaaaaaatataaaaatgtagtagctaaaaataaaataaatccgatataaagcattttcttccatccaatttgatcaatatatcttccagagaaaatacgtgaaagaagtactcctattacaaatataccagaagctaatccagcctcacttggtgatgcatgaaatctttctgttgcaaatgtggttatagtaaccatcaataaataaaatgtaaaataaagaaaaaagtttgccgtcgaaacaattaagaaatttttcgtccataatttgggtttatccattttttatatctccttttcattcgtaatgtttttttgtattttaggaagtgtctcaaatgttatgatttgatcattttctgaaataccctttaccacgtcattttctaattgagttattctttcacggcatacattataaagttcttcaccgatttcagttagctcaattattttttcacgtctatccttaccggatattgtttttactattagtcgttcttctaaacgttgaactcttcgtgttatgctaggcttttctatattatagtagttagcaatgtctactagggaagatggttgattattttttagatatagaataacctgccataatgaataggaaagatcatattcacctagtaattcatttagcttatttataagaggtcgatgtagtgaaaaaaagcgttgaaatagtccttgcatattataccctcccgaaaatatatagttatcatggttaactattacccagggtaattatactatttttatttataatgtcaagttgattatatagaaatatatattgcaaaaatgattcttcatgataattctaaaaatattgcaagaattttagctgcaattgtgaattgtaacatatatattaagttatttttaattttatactcataaatagttaatattatacggatatactagaaatagtaagtagtatatgatgtgataataaacttgcagttaatatttcagtagaataagtgcttaattaaatttagaataaaaaaatttagctgtagcattattattggagtattaataataatttttgtaaaagtattaagggagatgggaaatacatatggaaaataaaaaaacaaagcaagagacactaacaatttgcttacttttagtatatttagtagtgttaacctggattatattatttaagatgcaattctcacttaaggaattaggatactttcgaagtattaacataattccatttcatgaatctgtaatagtaaatggtaggattgaattttcggaaatatatgataacatacttgtatttgtgccgttaggaatctatattggtatgataaaacgcaaatggtctttcatgaaaaaatcagctttgatagcaggagtaagtctgctatacgaggtattacagttcatattcgcaataggtgcatcagatataactgatattataggaaatacctttggaggaatctttggaatcacaatttatcttatttttcttaaattatttaagacagagtttaaagcaaataaaattataaataccattgcattagttggaacgattttagctattttattgttagcatttttagttttggttaataattagaaatttggattttatagaactaaaggtttaggggttataatggttctgttatttctaaataataaaatatcattaaatttgcaaaatatagttagtgtaagtgtaaatatttttaaggaatcacggtacgctttaattacaagaatgtgttataatttgcatatattacatgaaaaggcgtgaagatattatgaaaagaaaaattatttcattttgtagcgttttagtttgttgcattatagcttttttaattttttatcacaatacacaatataataaatatacaataaaaggttccgcgtacattacagaaaagaataagcacttagttgggacggaagttttagagggaaaagggcaggtagaagaatatgatgagcataacatgctgaaatatagtaaaactataaaaaatatacctgatgaaatgaagctagcggattcggctttgattagtgactttgtaacaaaagaaaaaaacaatgaatatataactccagagataatagagacaaatggcagtataggtgtatttacgaaggatgatggtagcggttggaaactaaataaaggagattcattagtatttaattttgataaatatcaatcaaaagcaacgaagaatcaaacagcagtaatcggccatgtagtaaatgggaaaatggtaaaaggagaaaagtttaaagatttatcaggaagttatgaaataacagcagatgagcctggagaatattatatctacacaatcgatgctagttcagaatatcttgcattcaaacaaggaagcattagtgttcacgagtgttaatttacctggagtttgaaatgtaaaggcaagaagtgtatcgtaatcttaaggtaattaaaagataaatagtaactttgttggaggagacaatgttttcgtatgataatattcaaagatttaatgaaactgaaatcaagatatataagtatattattgatgtttgtagtttgaagatatttttagaaggaacaatttaaattattttaaagatatatactggaggaggataaaaaatgattacagaaggagatattaatataagaactattgaggaacgtgatttaaaagtaatttataaatttaattcacaaaagacacgtggaaattatcaagaatttcaatttgaatcatttcgaaaactacaacttgaatatgagaaagatggtttttgctcctctgagtttcaaatattgaatgtagaaaaagaagagcaaacaattggattgctctacttaagtttttatagacaaggaattgtgagaattggcttagttttaagttctgataattgtaacaaaggaaatggaacagttatacttaatttaatagtaaagtatatattcgagaattacccaatagtaaggatagaagctgatactgacgtagaaaatatcattgctcaaaaggtattgcaaaaagcaggatttctaagagaaggtacattgagaaaatatcgatatcatcatggtacatatcatgattcatatatttatagcattataaagtagttacttagaaaaaatatctttttaaaataaagagtggtactttgtccaatatgttataattgtatataaaaaatgtactaagccatgaagagagggaagtatataaatgattaaagaaattgaaatgcgtagaagcataagaaaatatagtagtaaaccagtagaagatgaaaaaataaatgaattacttgaaagtgcaaggcttgctccatcaggtaacaatacgcaaccttggcactacatagtagtgaaatctgaagaaatgagacaaaaaatagtagaagcttctcataatcaaaaatggatgtttacagctccagtatttattgtatgtgttgcagatatacgttgcagaattaaagaaggggatgtgtatttagatgataacagtcctcaggatgaattaaaaagaataattagagatacttcaatttcaacagggtatatgctactggaagctaataacttgggactaggcgtttgctgggtggcagaattcacacaggaagaaattagaccagtattaaatataccatcagacaaatatgtagttggagtcttaaccattggatacccagatgaaactcctaaagttcgtccaagaaagaaacttgaagatatgattcattacgaaagttgggagtaataaagtaatagttacattaatatttaatatattgaaatctagccctaattaggaaattgtatttctagagttttaaatttaaatccattaaagaagtatatataatgatttataaaccttaaaaagtaaatattcgattaaagtatcacactattaaaatttcaagttggtagtgtgattatttttatatcaatgaaataattttaataagaagtaattcataattcaagagaagctagcagaaatagttggagtaagccgccaagcagtttctagataggagcaaggaagtggctatccagaaatggagaaattacaggtagaggctgttcaaatgtaacggcctctatttgctgtagattactgctgtattctaagcaatatttattctgaagaatattagaatatatattcttcagaatatgcttgaataatgcgggtttagaggacatgttctaaaaactttggatttctaaaagacatgagtgttaaacatatccaccattaattcgaagagtttgacctgttatccattgagccttatcactaactaaaaattcaatagcatttgctacatcatctggttcaccaatacgtccaaaagaattcatttgtctaattgcttctatctgctcatctgtctttccaacgttgaaaagttcagtatttattggaccgggtgctacagcattaattgtaatttttttaggaccaaattccttcgctaattgacgtgtgatttgttcaactgctccttttgtagctgcataaacgctataagtaggaaacatacttccaaccactgaggtagagaaattaatgattcttccgttatcctccatatgtttcatagcttgttggcatgcaaaataagtaccttttacatttatattaaaaagcttatcaaattcttcttctgttacatcagaaagtaatttataaagtattacgcctgcattatttactaatatatctacctttccaaatttagttattgtttctgaaaataatctttcaacgtcttttatattactaacatcggctttaattgcaacagcttgctcacctgatttagttatttcttctacaacttcttctgcttttactgcattattagaataattgacaactactttagctccaagtgcagataattgtttagctatagcacttcctattcctctagatgcacctgttattattgcaactttaccttctaagtttctcattgatataaacctccattaaaataatttacttataattaaagatatatgagagtatttatattgagtaaatatttttgtcttgcatattctttatttattgatttgattataggataatttagatatgaataggtagcctatttattcctaatcattgcacaatcctgcaaaagaaattataatttttttatgaggagatattattatggaaaaaaggatttacaatataaaaaattataaattatgtaatcagcaaaggcgtttggcttctctagttgagaaatttacttatagagatggatttcaatcaactgatataccatcattggatttaatacgtgcctctaatatttcagaaacactacattcgatttacatcccatccatatgcgtaattgtacaaggtgcgaaaactgtaattctaggaaaagaaagttatagatatgatgcaaactcttatttagttgcatctgttaatttacctattataggaaaaataattgaagctagtcctgaccatccatatttatgtgtcagacttagttttaattcagatcaaattcttgatatcatcaaagaatcaaaacaaaattttgaagaaaagcctggcttggaaagaggattaactgtaacaaaaggtaatgcatcacttcttgatgcattgctaagacttgtaagccttttagaaacgccagaggaaattccagttcttgctcctctatttattagagaaatactttatagagttttacaagataaacatggatacatattgaagcaatttgctgtgataggcagccatgcacgggctatctcaaaagctattaacttgattaataataattttgagaaaccgctgcggattgatgaattagcaaatgaaattaatatgagttcttcatcgttgcatcattgctttaagaaggttactgcaatgagtccattacaatatcaaaagcagattagattacaagaagcaaggagactgctgctttcagaggtgctagaagcagcggaggcgggttataaggttggttatgaaagtccatctcaatttagtcgtgagtatgcacgaatgtttggattaccacctataagtgatataaaacggattaaggactctatatatattaatttttgagagtggtaaattatatagtaagagaagctatataataaaaagctcgattctttacttatgattcgatgaattataccataagtaaatgggggactaaaattgggagatgtctatgtttcattgatattccaaaaaaatttacaaatgatacaagtttagagagactaaaaattaaccccacgataatataaaaaaatattctcatgggggttagctataccttgattaagttaagtggcaaatggtaaatcctttgactgttttcgagttgtaatgacggattttcttctagtctcccttattgtaggtgtgttttaggcgtcgtcattttgttatcatagaagtatcataattcagtttcaaattttagcttagaaatagatattctagagtatattattaagatttaaatcttgttttaaagtattaacttcatttcttatctcattcttaaaatccgttaaaatatctttttaatttgatgtgaaaccacaaagcaggtcccaacaccaactgtactttttagttctatttcccatccgtgtttttcaacgattgattttactaaggacaatcctaatcctgctccagcaatctttctggaccttgacggatcgactctataaaagggttcaaatattttgttaatatcctctactggaattcctataccagaatcagaaataataattttttccacattattgtctatcaatgtcttaatttcaacttttcctttaggaatgttgtacttaatagcattttcaatcaaattaaaaaatgcaccatacataagtgttgcatttcctataatcgtactaaatccaaattcgtgggtaatacagatacttttgtcattatatattggttgtaattcagtttctatctgtgaaaataattgctttaaatctatctcatctgcaatatctatacaactttcatttgtaagtacaaataaatcatctacaatattcatcagtcgttttgtattacgttctactatttctattgtttccttgtagtcttcagttgtaggttcatcatcaatatgaagaacctgtaagccagcattcatgatagaaagtggggtttttagttcgtgagatacactggaagaaaaacgtttttgccttaagaaggattcatttagtctttctaacattgcattgtaagaggttactaagtttccaatttcgtcatttacaatataagcaggtattctacctttaagattatgttctgtaatattaataatagaatcatttaactcctgcaaaggtttcaaggctttccgtgtaattatataagtaactatcattcctatactagaaaaaataattaaatatatataactccatatatcaaattgtttttttgccagaagcatttgagacgaagaggttttttcagattttaaagtattgttattttctatcggtaatatctttatttcaccagaggtagggtcttttgttattgcaatttcatttggcagtacaaatttatcattagcattatacatactagaaaatgttaaaagtaaagatattccaaataatattccacctgtcaaaagagtgattctcatcctaatagaaaccttattcagtaacttcattattatcctccatcaaaatatagccctgagacctgatattttttatatactccacattacatcctaattcattcattttcttctttattgaatggatatggtattttaaagagtttgagaataaatctgcttcgctatcccatacatgctctataaactgttctgcgcttattaccatatctttattaaggaaaagatactctaatatttcatattctttttttgttaatagtaacgaagactgaccaaggtaagcagttttggaaacagtgtttattttaagatctccgcatttcagcactgctgatttttgtgtgaaggaaattctcaaaagcatccgtatccttgcttctagttccttatagtcaaatggtttaattagataatcattggctcccatatctaaaccaattactctatcttctatatcgctacgagcagataaaataagtactttcgtgtaaatatccttttcccgtatgacctttaagacctctaatccgtctagatttggcagatttaggtctagaatgattaaatcgtattcattgatttcatacatagatactgcttcttcaccatcgtaagcattatctattgcatatccactttttttcaaaccttttgatataattgcggctaaatcttcttcatcctcaactaaaagtaatttcatcttgttataatctcctttgcatggtataaaaagcaaagcagtagcatgtatagctactgctccaaaactatttagagctatctgcctttgttggctcgactttgtttaaatcaacattgttaagattatctgttgtagttgtttgtatactaataccatcaccagatttgcttataaatatctgattaggcatatctggtgcattagttcctgatgctttagttgatccagtcttactcaaattagtattgtcaattttatctgttgtagttgtttctatattaataccgtcaccagatttgcttataagtatctggtcaggcttaactgttgtagctgattctgaagtcttagctgttttattagattcagttgatgcaaatgataccatagacgttgatgctatcaatgttaatgctgctagtgaagtaaaaccaattgttttcattttttttgttatattcataatatagcctccgttataaacttttattttgtaaggttgcaacctatgtacctagtatatcaaaacaaaagttaggagacggttagttttattataatagtaaataatctttaattcaatatttcgccctgtgagaatatacctataagctgatttcatgaatgttttatctactgatctgcatcttaaattattatttattattttcactgtctacttaacaaggagcagttcattgaaaataagggctactatttttttgagattttttatataagaatcacaatcaatattaatagtgacattaagaataacccaacttgaagtagaagcataaaacttcttgttttgtttcaagaagaaaattcataataaatgctgcaaatacaataccgctatttaggtaatataccaataatagtattatattaaaaaatatactatatcatttattaacatatatatcttttaatgatatatcgttaaatgatatagaggaggtgtatgagagctggctagaaataattctttagatatgggcgaacttacggatgcgtattactatattttattatctttaataaggcctaagcatggttatttaattatgaaatcagttgaggaaatgtcagaaggggagttctcaataggccctgcatcattatatactagcataaaaaaacttcttgatgcagaatttatagaacttacgcaagaatcagaaaagaaaaaagtttatgtaataactgataaaggaatcgaatctttaaaaaatgagcttgaaagaaagcgtaaaatggttaaaattgctgagaatgcatttaatgatagggagatgttataatagatgtttggtacaaaatatattatgagtaagggattatcatttgctgagtacgaggaaatgcagatgctatctgaatatgctagtagaggatggaaattagagaaatttgcatttatgggatataaattaaaaaaagctgagcctgaaaaactgcaatatgctttagattatagaataaatccagatgaagaatattttttatattttaatgaagcaggatggactaatgtgtgttcaataggaaatataattcacatatttagcgctcctgaaggaacaaaaaaaatttatactgataatgatactgaaatagaaaagcatataagcatgtatcaatcactaaaaaaagtggcaataccattttctatttgttttattatcctttttattttaatggcttttgttaaatatagatatttgcctgatatatataatacagtacttttaattatttctataccaataatggcagtttctatttttacaacactaccatgtttagagcattatagtaaaataagcgaacttcaaaaaatgtctgattcagataagaaacctaaaataagtaaatttttaatactaaatttaataatatttatattgttacttgttctaatggtttcaaaagttataagtatgcctacgggaatatatttaattgtttttaacattattatattaatgtctgtatatagacgaaaattcataaaataaaagtaagagacttatatattttaataattgcttgatgtagatacttctatacttttaacttattaataatattggtatgcagagattttagtattttatactgatacgatgaatttatatcataaatatgatttatagctttaggcatttatatattgtctaaggctatttttataagtgaaagcaaggtgtcataagtgatgttgtctttacaagatatgttataatttagagaagtgagaggtattttaaatataaaataaatatgaaaatagctcttgatgaaatttatattttctatttaatgttgttattgaaaatcagcatttcagtaatatttccttataatgaaagtaaacttttatcaaaacgaaatttttagtttatgtaaaaagtatttgggagagggccttaaagtgataattaaaaaatctttgataaataaaagcattgaatacattttgcagcatatagatgaggagatttctattgaagatgttgccaattactgtaatttttcaaaatatcattttagtagaatgtttaaagcagaaacaggaataagtttatattcctttattaaatgtataaaaatggatcaaagtgcagtaagtcttaaggttgaaaaagacaaaactattactgatattggaattaattatggatacagttcttccaattatagttcagcctttagtaagcaatatagtatttgtccaaaggggtcatatggcaatagagaagaaatatcatattaataatgattatttaactatgttataattaccacatgaaggtaacactaaacaaaatacatagaatgctagtggaggaaaaagtaatgaatgcaagtgaaataaatattttaacggaaagattagaattaaggtgtattacgcctttagacgctgaatcaatttttgaatatcgttcaagtgaagaagtaggtaaatttcaaacttggaggcctaagttgcttaaagaagtagaggaatttatttctgaaaaagtatcaagaattcccaatataccagatacatggtaccagcttggaattataattaaagaaaataatgagtttataggagatgttggtattcacttttgtgatgaagataatttgcaagttgaaattggatatacattatctgaaaaatatcaaggaaaagggtatgctactgaagcagtaacaggcgtgatagattacttgtttaatgttttaaataaacatagaataacggcatcggttgatcctcaaaataaaaagtctattactttgcttgagagaattggaatgagaaaagaggcacattttaaaaaaagtttttggtttaacaatgagtgggttgatgatgtaatatatgcgattttaaaagaagaatggaatattcagtgacatggaatttggcgcaaataaatgataaaaaaatatatgacagaactcttggaagagagcttttaactatttaaagttcttactaagtagtctatttaattcagcacaaaagccagtttcccatataaaaattatatttaatgtataatatgtttaaatatatataccgcaaaaataattcttcatcataattctaaaaatattgtaagaattttagctgcaattgtgaattgtgaaatgtgcattgtgaatttcaacatatatatataaatggatagatattttgagctctatccatttttttattttggtattatatttaaataaatattaatctaattgatttagatacttacgaaagtttttttcattttcttgtaaaataccaaaaaaattatcatctattttttcaacaacaggaagagcgagttttaccatttcttgcccctttggcagtagtataattgcatttgctctactatctttcggatttacagtttttcttataaattccttcttttctaatcccttaacgatttgggatactgacatgacatccatatctgccatcttagaaatacttacttgagtcacattatcatcagattggctgagaaagtttaaggtggtaagcactacaaattgaggatgagtaatccctaatttacgtaactcttgatttataatggaatgccatttattatatacacgaataaaaagaagtccggttgacgattctgcatcatctttaaagcgatttgatggaaattccaatttatttttcaacctccttgtataatctagttgtaacatttgatagaaaactatttatctttctaacgaacattacacctcttattatttttaatattctaatttattactttgcctacgccccgatagggaatatg

SEQ ID NO: 116 - DNA, 16834 bp, Clostridium beijerinckii
atactaaaatactaatataggcaatctaaaaaatgtgtatagaaaacaagcgtttaagtacacctaaagactatattagaatttctatattaatataaatttatactataaatttatattacaaaagattcaaataattcgcaaattaagaaatttgcaatttgttgggaaaaaatagatgcatttttaataaaaataaaagtataaataatattttatattagtatgaatatgaataatatataagaagaaacgaatagatattaacctttttgaaaggagtatatatgagcaatccttttggtatacttgtttatttagatgaaattttagttagaaatttatcctctttagtgttaactggattcatagaaacaataactagaactcaagcttttgatagaacattatcagcagggtttcatgagggagatagaatagaaaattctaatcaaggaagtgttacaagaattgagagaaaaggatttaaggataaaaatgaattagatgctaataataattttgagcatcatcatattgataaagaaatagatgcaaggcaatgcgtaagagaggaaagacaagttaagactacttatactacattcgtattaaatggaagtttaattaactactttaatgaaaataaacagttgcagcataaaaatgaaaaagatatagaaaataataatatatatccaggagatctaattgagattgaaggaacaattacaaataaaagcattatgtcttatattgaaactctaattaatttgataacaatatttggagcagaatacttggatgatctaactaaagaatgtaatgtgaaaataaatttttcaatgtgcttaaaaatgctgacttatatgaaaagtattttagaaagtaataacactacagatttaattatgaaatgtggaaatggaacaataatactaaacgtcaataaagataatttcatgaataataaatttaatatatttgataatataaattgtccgtgtagggtcataggaaaagtaataaaaacgtgcactgaagaacaagattctataagtttacttagaaaaactggccaagaacagttttatgaaaagttttttgagcaatttactcctcttatagagtgtttagagaaaaataatatttttgtaccagagtgcccagatttaagaattaatgattgcgcaatccaaataatgccattaaacatttacatgtaaaaaaatattatgattttaatgtgttttatggaaaaacacttgtttatctatagaatacatgataatatatattacaggtggaatatgtttatatatacttaaatttgttaattaataaagatatattttcatatttaatacaattttgaggtgatattagatgaagtttagaagtactaggggtctggataagaatatagaatctgctagagcaataattaatggaatttcaaaagatggcggattgtatgttccagatgaatttcctaaagtctatgatgaattgaaggaagatacgcatattaaatatgaagatctagcatttaaagttatcaatgagtttttcacagatattgatgatgcggaattaactggggcaattaatgacgcatataatgatagatttagtgtggaagtaaagaacaattttttagaattatatcatggaccaacttgtgcatttaaggatgcagcgttattatttttaccacaaatcatgaaaagagctaaaaagatttgtgatgttaaagaggatataacaattcttacagcaacttcaggagatacaggaaaagctgcacttgaaggttttaaaaatattgatggttttaaagttgtagtttattatcctaagaatggtgttagtgcaattcaggaaagacaaatgtcaagtcaagaaggaaacaatgttaaggtcattggaataaaggggaatttcgatgatgctcagacaggcgtaaaagaaatcttcggagataatgaattcagagaagggctatctcaaaaaggatttatcttatcatcggcaaactccattaatattggaagattagtacctcaaatagtgtattatttttatggatattttaatttagtgaaccaaggagtaatacaaaaagatgatcctataaatgttgtagttcctacaggcaattttggaaacatattagcaggatattatgctaagcaaatgggattaccaatagataaatttatatgtgcatcaaatgaaaataaagttcttacagatttctttgaaactggggtatatgacaagaaaagagaacttattttaacagaatcaccgtctatggatatacttgtttcatctaatcttgaaagattattatttgaagcaagcggtagagatactgaagttgttagcaaattaatggaagatctaactactaaaggtgtttatgaagtaaacgaaaaaattaaaagcttcataaaagaattttatggaaactttgcgactacagaagaagtgtatgatgctataaaggaagtttataagaaagataattacttgatggatactcatacagcagtggcatatgtagttaaaaagaagtatatagaagaaactaaagacgacaaaccaactttaatactttcaacagcaagtccgtttaaattcccaagaagtatttgtaatgcacttgatattgatgtagagggattagatgattttaaagtattaaataaattatctgattcaacaaataataaaataccaaatagtttaagtactttggaaaatgcaaaagtaatacatgatgaagtttgggataagagtgaaatgagaaatgctctattatcttatttggattcataggtgataaatatatgattacagttagagtaccagctacatcagcaaatatgggacctggatttgacacgcttggaatagcattaaatttatacaatgattttgggttcagggaaatagaagatggtttgaagtttaatggaatgccagaagagttttgtaatgaagataatattatttacaaagcaatgaaatattgttttgataaagcgggctataaaataaaaggattagaaataagtgaaattaaacaagatgttccagtatctagaggtcttggaagtagctctacatgtatagttgggggactagtaggagctaacgaaatcttggggaagaagttttcagaagaagagttgttggagatggctgtagaaattgaagggcatccagacaatgttgcaccagccttacttgggggcatggttgttgcaatagttgatgaaaacaagacctattatgataagatagatgtaaaagatggaattaagtttatttcgataattcctaattttagattatcaactgaggaagcaagaaaagtgcttccgaaggaaataagtttaaaggatggagtatataatgtatcaagagcagctcttatggttgcatgtttttctagcggaaaatatgaattattaaggtatgcatgtaaagatgcctttcaccaaaattacaggagtaaattaattcctggttttgaagaggtgtataataagagttatgaattaggagctctagcttgctatctaagtggagcaggtcctacaatcatggcgattatcgatgaaaaggatgagcgctttagcaataagcttaaagaattcttgcaaataaaaggattggaatggaatatattagagttatctttagataatgcgggggcaaccattatagaaggtacaaaatgatgagtggagattacttagttatagataaaagggttttgcctgatgtttatgaaaaagttctttttgcaaaaaaattattaaaagatggaaaagtaaaagaaataactgaagcagtaaaaatagcaggaataagtagaagtgtttattataaatatagagatttcgtatttgattttgcagaaacttcagagggtagaaaagttacctataatattatatttaagaatgaaaaaggacttttatcgaatataagtaattatattacagaaaaaggcggagacattttaacaataaatcaaggcataccgttaaatggttatgctaatttgagtataaccatagatttgtctacagtagatggagatataaaaacattgacagagggtttgcttaacataagaaatgttgaaaaagttgaatttataggaatggaataggaagggaaaccttcctattttaattatataaatttaaaaaatataaaatctgttcaaaaatatgctagaataaattaaagtcagtagagacaagttttatatgcaacaaggaaggttttatagtaactataaagattagaaatagcacattattcagaaatggaggtgtgttttttattacacaaaattaaaatggagtgatttcatgattagaaataaatatgaaagtgattatatgattaaaaagcttggattaaatagaatgtcagaaaagatatttacgtataattcaactttagatgaacttaaaagttatttagaagagaatacctataaatattataatataagagataaatctgtatcaggcggtaagtttttatatatgcttaccaaagatcaggtgttgctaaaaagcaaaaaatacaagagatatgcagtatatgagagtttagctattgcagatgatagattaatattacaaggtgacatagagatagacagagattttattatgagagcatcgttaagtgatataaaaggaatatcaaatagaattgcaatggaaaagccagtatataatatttataattacgatctaaaagaaaaaagagatccgccaataagtggattagctaaagttatagattatatatcacaaaattctttaattgacatggtggttgagttctctctgtttgaaataccggttggaataaaccaagaaaatataataatttgggaattaagaaactactaaaaagtgatgactaaaattatatagaagtaaacatcatatattttttaatgaaaaaacaaacttcgttttcttatgattcatatgttaaaatttttgcaaatgtaaataaaaggcactcgttatgagtgcctatcaataattagagaaagcaaagtggaaagtttgaactctaacttatttgattttattatagcataaagaggggaatatatgaatgtctgaaataaaaaaacaattcagtataaacactataattatttatttcgagatgaattaaagaaaatacaaaaatattgaagagtttagaaaattccggtatgtttaaactacaaaaaatacaattattttttcagcttacaagtaatgacataaatttacatggaaagatgttataattttattgtaaaagggttttaaaataaaaatggggtgagataatgagagtattatgtaataattgtggtttaaagtgtcatattaaggaatggaaggaaaggcttgatgatttgctagccaaaaagcaaaataacttattggatgatgaagtaatttgcttaagtcaatctattgatgatttaatatctgactgtatattttgcaacacaagcaatttatatagttccaatcgaagaaatactggtgaaagagattctattttatactactatggagagcagcatttaattgttaatttatataactacatagaagaaggaataagaagtgaagaaaatatctacatttctgttgagaaaaatctttataagagattagaaaattatcttataatcaatagaattcctacagaaaaatttaaatttatgtgtttaaaagatattaaatcaatgattgagaataatgacaaatctattaaattaagagaagaaaaatctaggtggatagttcaaccatctttacaaaagcactttttatatgcagaaagtactttaaacaaacatactaaagatttagatttggacattctctatgtatatgatgcttatgagcatattcatagaaatgctaagagtgagttaagctctaaactattaggaaaatgtcaatattcactaaaaagagaaagtcatgaattatgggtttaaaaataatgtggatttaagagtcttatagttaaggctcttttttgtgttacaggatcactgataaaggcaaagtcttcaaaaatataaaataaaaatagccttattgttgtatggaattataaagatgttaggttataaaattggattatttaaaggaattaagtaatgtggaaatttcaaaatgatacaactaagcgtggcgtatacctccttgttcatgatcagtagaaaaatgcttaaatttcagacaagctcctataaaggaggagcttgtatatacatttgtaattataaagagtatttatctgccatttatattgattggtgaaaatgatatgctgccatcaccaattattataattttataatcatatttcataggacgcagtacatatttcattgaatgtccttcgaaccttatagattgttgaattcttttattactatcgaaaataatcataaaaacttcgttaggagaaaggttctgaacattatacataacattttgcatgatacttaaatctgatatagtgtagaatccttctgaaaagttttgagggagagatgcagcagtggcagtcgttttattaatattaaatgtgattagtaaaataatagaaagtataaaagtaaattttttcattatttagccacctttcataatttaaattaaaatattgaaccgctcaaattttattattagaatttagataaaatatataacagaaatatgttagaagattaatatgaatactaggaattaatgaatataaagtaaatgtatctggtaagattgattagtaattacgttgccataatgaatatagttgtagtcgatattattagaggatgagaagtatagattacttaaagttgagtttccaattttttgcgtaatatcaataagctaaaaacatataaataaaaaaaaggagaattagttccaaatagatagaccccattagaaatgtataggggatagcttggggatgtattttgtaagataataaagtgatttctattaataaaaatttaaagaatgttgaaatattgttaaaaattttagaatattaactatatatagtcattaggcgtgatatagttaatattcagtagaaatataagttgaaaataaatgctattataacagtaaattatgatataatttaccagtgataatagaaagtttaagtataagactattaagttagttttattgacatgaggtgtatgcggtggaaaatacagaaattgactcgaagattaatatgtttgaaagaaaaataggaagaagctctaatttggagttactaagaattttggcgataataatgattattgcacatcattattctgttcatggtggatgggatattcctaacgaactaagttacaacaggataattgtccaatttttaagtttaggtgggaaattaggtgttaattgctttgttttaattacaggatactttatgattaattcaaaatttaatataaaaaagtttgctaaaattgtaggacaagttttcttttattctgtagttataatgctgatttttaaattattcggaatatctcatataggaattagagaaactgctaaatcatttttccctataatattttctaagtattggtttgctactacatatgtggaattatatatactatccccatatttaaataagcttatcaattattgtacgcaaaaagagaataagatattgattaccatactgattgtagtgttatcagtcatacctactttttcaaattcattacttgaaattgataatctatcttggtttgtatttttgtatttagttgcaagttatataaggaaatatcaacataagttttttgataagacgaaattacttttagtgatatttactagcagctatatcttaataatgttctcggtagttatactcgatgtgttatctctaagaataaatgattttcctattgatcctacatttttaagagagatgaattccctaccaatgtttatttgctcgatttcattatttctttattttaaaaaattagatattggatctaaaaagataattaatagtatatctttaactacatttggaatatatttgattcatgataataatcttgttcggagttacttatgggaacatattgctaaaaataattccttttacaattcaagatggttgtcgcttcatgctataattactatttctcttgtatttttcatatgcatggttattgaagggatgagaattaattttgtcgaaaaaccagctatgaagttttgggatagggaaatagagagcaaattcctaaataaaagtagaaattatatagatagatctttctcccaacatatatcaaattaagaatgagaattttattgtctagatttcattattgttatgaactaaaacttatattaaattattaagagatgcagacttagaagttacaaatatttctgagtttgttttttttattccttagttatctatatgaagccaaattggtggacattgagttgattcgttgtgggtataaatcacgagaagactgattcatttaaagaagtcttaagattagtaggagatttatgcttcacagtattatggagctgtcttaagtagttttatgagcagcttaatgcataataagatgaatcataaattagtataaactttgaatgagtgagtatactaaagtcaagaataatatgcaaaatagaaatttagatataagtacataagatattacaaaagaagattttaggactatataccttatataatatagattaatgatgataatgtttagtcatgttagtctatatgttatttagaaataatatttatatatcattatgtggcttactgatacaaatttttaacatgagttaaatctaaagaagtgtaaggagagataattatgactaataaacgtaaagtcactaaaaagcaaatggcatcattaggattaagaaagactgaaaatggagattatgattacataaatccaaatgatccaaattcaaaatataaacctgtaagaaaagagccaaataaataaggctcttttttattttaattaaatttatttaaattctataagcagtattgtcagatttcataataataatacgaattatattatgaaaagcaaaaaaacaactgacagaagttttgcagtacttattaaaaccagggttttaaatttattaagaagagtaaacaaaaaatagttactttatgtaaaagaaaataactattgggagggattttataacttggagaataaactagttgaaaaattagatgatttaaacattagcgatactgatttgttgctatctaaagatataaagttatcattagatgatattactataaagaggattgaaaaattagttggcaaaaaagctggctattataattcaaataatacgtttaaagaaaaggtaaattatattttagggggaatttatatgaaaagaaaaatagctttagtactatctgttgtagcgttttcaagtttagggggaggcgtatatgctcatgcaaaaaccactcctgtagcatacgttagtgtggatattaatccaagtattgaattatcagtaaatacatttgatcaagttatttcagcagaatcatataatgaagatggtaaaaaagtgttggaagatactaacctagtaaatagcgatgttgatgatgcagttaagaatattattacaaatgcagtttcagatggatatataaaggaagacggtacatcggcagttgaaattactacagctacggataaagataatgtggcaacgaagttagatgaatctttaaaacaaattgctgacaaatcattagaggaaaataacatagaagcaacagttgaaactcagaatgttgctctttcaagaagagatgaagcaagaaagttaggaataactccaggcaaactaaacttgatacaaaaactacaggaattagatccaactataaatgtagaagattataaatcaagttctgtaaaagatatacaaaagaagactaaagaattaaagaagatcaataataatgaagagactacagttaaagatgatgcaaatactggtggaaacgtagaagatgatactaatcaagatgcagcttcagaagagaaaataagcaattcttcttctaaatcaaatggaaatggaagtatcaagaaagaagagaatagtgattcatctagcaaaaaagaagaaaatgccacagaagttgaaaaatcaaaagataattcagctaaaactcaaaaacaaagtgataacggtaattcaaactcacagaatggtaataaggataaaaataaaaataactaaatagtttaaaatgagtagctaatatagaaaataataatagctactcatttttgtatgtatgcgataacaaatttgaatttataactctattaaatcaagtgaaagagcagaataataaatttaatttaaatatatatcagctaaatagtataaaaaatcattattgaagaatcactagtaatagcattaataggatttatctatatatttaatatatattacatagaacaggagagaaaagaaaatataagtatttatcattgataatgtaaaagttaatatattttttgaaatttattgtcagattttatttatgtattacgaactgtataatatataacgaaattttaggggaagaaggtgcgttttgatttcggatattgaattactaaaccttttggatacgaaaccggaaataggccttaagaagctgatggataactatatggcacttatttacacaataatatttaataaactttctggaatgtattcaaaagaagatatagaagaatgtgtaagtgatgtgttttttgaagtatttcattataaaaatagaattgatttagataagggatcaattaaagcctttttggcaattatagcaaaaagaaaagctatagatatgtatagaaaaaataaaaataataatcatcttccaatagatgatgtagcccaagaattacatagtgttgtagatgatgcagcacattcgattttattaaaagaaagcaattctgagcttataaatgctataaaatcattaggagaacctgatagtgaaataattataagaaaatattacttacatcaaagctcgaaagacatttccagtgatctgggtttaaaagttaatacaattgataaaaaagtctctagatgtatggaaaaattaaaaaaattattgggaggtgggagataaattggatgacaaattatttgaattattagatgacttaaacattagtgatactgatttattattgaatgaaaatattaatctatctatggacttgtcttctagaaaacgtattgaagaatctgtaaagaaaaaagcgggatacttaagcaagaaagatacatttaacaataagatgaaaaatattttagggggaacttatatgaagagaaaaatagctttagctgcatcaattgcagtagcatttagtttaggaggaggagtatatgcttatgctaaaactccggtagcatatgtcagtctggatattaatccaagtgttgaattaggagtaaacgcttttgatacagtggtatctgcagaagcgtataataaagatggtgaaaaagttctagaaggaactaatctggtaaacactaaagttgacaatgcagtcagtacagtaataacaaatgccatatcagatggttacataaaggaagatagtacaaatgtaacaacctctgcggcagttgaaattacagtatctacagataaggatggcttagcagataaattaaatgaatctttaaaagaaactgcagatgaaacattaaaagataatgatttagaagcagaagtcgaaactgataaagtagcgcttgcaagaagagatgaagcaaggcaacttggaataactccaggaaaattaaatcttatacaaaagcttcaagcactagatccaagtattaaggtagaggattataaattgatttcggttaaggaaattcaaaagaaagctaaagaattgagaaaaatgactagagctgataatgatgctgttgatgtagataattctgtagatactaatacgaatgctacagatagtaatactaatactgaaacagatactaacacaagcaatagcaatcaggatgctgatgtaacgtctgaatctacagaagatattacatttacacaatcatcaataggagaacaaaaaactaaagaagctaagacagaaaaaagtaatgactcatggaatgagaaaagtaataatggcaatttgaaaaaagaagaaaatagcaatgcaggtattaagcaagaagaaaatgaagataagaaatataaaaagtcttcaaatggatctgaaaaaagggatgctgaaactcatggaaatagtaactcatcaaagtcagagaaaagtaataatggcaattcagattccaaaggtaaaggaaatgataaaaataaataggcagtaatttaaactgatacattttttatagagatgggataattttaatacgtaaattatcctgtctctataaacattttaagaactttaaaattctagaaaaatatttttcataaatttaataacctgagttctaaatctgtataggggtatcatatatttatttagtattaacggatacaattgcaagataaatttaaacttattttgtgattgtatttgttatttcaacgtattgaaaaataaaagggaattcaattttgagtagtagggggatgaaaaatatatttcctttgaaagatggacttaatacgaggatgttttataagttatatataagcaagcgtgtttaatgtactcataggaataatttgttgtacagtgtgaagaggattgaatatataaggttaaggagtaattattaaaggggagagtttatatgggaaaaaaatatgtaatgtttgttgatgaaaggggaattagaagtttagataaaagcggaaatttctcaatggtaggattgatttttgaatataattactgtattgatttaaaaaacagtgaatgtgaattaaaaagaaaattaaatgaatataagaaagaaagttttatggagagtgattctaatataccaatagatagcataatattggaagataaagtatacaggaattttgacaaagccagaatgaatgagttcgtaagcaaactaccaacattaattagcaaattaagattcaaaataatttcaagctcaataaaacagaatttaagtgaaacagaggattcatattcaatagtgacaaaaagacttttaaagaagttctattcgtttattactaagaatgatggagaatcaggcgggatagtcattgaagcaaaagtaggaaatagaaattgtagtataatgcaaaatttctttgatatatataacaatagaaatattaatttaagtacacaagataacgttcagaataaaattaatacgtttattgtatctgacaagaataataaaatttatggttccggaatagagatattaaatataataactaatgtattttttagagttttaaatggaaatagagaaattaatgaggaattaatatcatacatagagtatggtaacagggacaagatatttagtgagcttaaacataaggtatacaacgatttagaaataggaatatcacggactcaattacaagccatttcgcacaactatattgaaggttttaataaagaattaaaattactaaaagagcaattaaaacttaaggataatagaataaaagaaaaggaaaaagaaattagtgaacttaccagtgagattaaattgttatctaaacagttagagagagttttagtgaacagaaaaatgataatatagtatcacgaattttcttatatgtagatattgaattttgtttgacaaagcgattacaatttcaaagaattatttattcgcaattatatagttatatgataaggtagtatattagaatttataatagaaacttattatattaaattaggaaagttaaaatgcctgaaagaatcttaaatgaagcttttgggcattttattttgtaagaagaataaagcaaaacattagaattttatagatttcctcaataagtattttaaatttctttaaataagggaagcatataaaaaataagttttttagtaaagaggaatttatgaataaattatcttatgaaaatgaagtggaagattattctgaaaaatttaaagatttcaagatgaaatctatccaagacaatgtaaatcttggtataacgctttatgtacctaagggtgaaataaaggggatatttcaaatcagccatggtatgatggagcatagaaaacgctatatacgatttatggattacttaggatcaaatggttatatttcaatagtacatgatcatatagggcatggagaaagtgttattaaaaaagatgattatggttatttttatgataatggagctaccaatcttatagaagatttacatcagataacactgtatatgaagaaaagatacagggaatatccttattttttatttggatttagtatgggatcactaattgcaagagcatatttaaaaaaatatgattatgagttagatggtcttatactatgcggttcaccagtaaagaataaagtcatcccgtatattaaaaaattgtgtaaaattatagagaagataaagggagatcattataggtcaatttttatacataaaatacttcgaggaataggtgataatgttataacgacctcagaaatagaaagagataagtttatgaatgatgaaggctgtggatttattttcacaataaatggatttgagaatttatgtaacctaataaaaattgactatagcaaaaaagactgggcaaaaagaaacttaaatctcccaattctatctattgcgggggaagaggatatagttattataagtaaaaaaagatttaatgaattaacaaggtttatgaaaggaatgggatatgagaaagtttttactaaaatatattcagataaatatcatgatcttttacatgaagtaaataaattgcaggtatataaggatattttaaattggatggatagagttaatgatgaaaagaaaacttgattttatcaagcaggatatttcaataggtagatttattgcaatgataaatctacatttattattatactaagccaatggcccaattaggataaaaatttagaaactcaattataatatatataattgcaaagtactattatttgggtttataatgctgttaaaggatgtgttaaatatgaaaaaaatagtttttggcggaggctgcttctggggtgtagaaaaatttttttctatgataccaggagtattagaaacagaagtaggatatgcaaatggaaaaacagaaaatccaacatatgaagaagtttgcaaaaatgatacagatttcgttgaggtatgctacataacatacgatgaaaaaatggtttcacttgatgaattattagataagttttggaatatcattgatcctacgacattaaataaacaagctggagatgttggtactcaatatagaagtggaatttattatattgatgaatctgatgctgatacaattaatagaagtaaggaaaagattcaagaaaaatgtgatgttcaagttgtaactgaggtaaaaccgctaaagaaatattacacagcagaagaatatcaccaagattatttagaaaaaaatcctactggttattgccatattaaatttaactaatattaaatattgatgagttagcgtatttatactggtaacttattaaaaactatcttaagaatagaaaactattttaagatagtttttttgtttttggggaaaactcacttggagattttttaaacaggtttttaaatgaacgtagaaaacatgtataatcattaaatccacatagtaaataaactttcgtaatttgctcaccactgcttataaggtcctttgccattagtaatctcttttgatttacatagttgtgaagagtatatccagtttcttttttaaacttatgcataagataatatttgctaatatagaacttttgagataaagtctccgtagaaagattttcagataaattattatttatatatttcaggattttttcaatttgcttatcatatttgagagatccttcatcatttatatacatgttgttaagatgaactctatttaagtatacaagcaattgaataaataatgaattgctcaaaagtttactaccaaaatcttttgaattaaatgaagtcattagtgaatctattataaacttaatgttatcttgcaatttactattaagtctaataagattgaaacttttttcattcgctagtctaaaacaagtagataaatcacaattttcatagttatggttttctataaaatcagaattcgcccagataataattctttcataaatttcagaagaatcaataataggtttatgaacatcatgattatttacaagtagaatatcccatggttttaagttgtatgcttttccttcaattaaataagttacttttccagataaaaaaattattattttattaaagtcgtgataatggaactcgaattcttgattttttttatcttttaaatgaaataattgaaaatcattgtttaagtagcctgatttattactatttttattcatagttgaaaactcccttgaaataactc

SEQ ID NO: 117 - DNA, 16396 bp, Clostridium beijerinckii
taaacaaagtcgcttaattttattccaatttctgtaaccgttcgtgttttaaaacggtttgtttgccatactctttttccaaaaactatttttttgaaaattaacttgactattattagctggtcttgattttagatagttgttaattccagccaccaaaacatgctatatatagattttgattccaccgaatctaaaacgtgatttttattcgtagagttcactagttccatttttatgataatacaacttttctattagtaaagcttttatttagctaaaagatttagttaacacatataaaataactttaaagataagccatcaactttttatttctaaaatccagaataattttggaaggacaatcctatgtttttttacataatcttcaaaaatattttatctaaaagtcatctatattatatcttaatctatgaatccattaattcataatgccaccattacacccattaaaaaccaaaatattcttttatccattttgcttagtagcttttgtaaacaaaaagatgtacgaataagatataccttataaatccatttagtattattttagtacttatgcgaaatatatcctaaacaattttactgtgatataattaataattacaaagtaaacatataccctcaattatacattaaggataaattccaaaaagctccactaaatcttcatttagcggagtgtgctatacttactgatttctttattgtagagattatgaattatttaacgttgaacataggtctgacaaacttacaaactctatctctaatttatggtaataatatcttaaaactcacttttctcgtttaaaatagatctggcaatcccactattgaatagttatacgtgtctgatttactagttcctatataacatttattatatataggaagaccatctgcatatttagaattaaattcctcctcagttaatgtagtacctatcctatagttataatttattaaatagtaagtttcttcaagtgttccaactggtattgaaaatgtcagagttgctatcttaccattgttagttatagttggtgttaaactaatggatgttagagtattatctttattaaccttatatacgatagtactaatattagatatatttatatcacttaaatttgatgaattaacatctatagatactgtggtactttgtccattagtttttattaatgcacccatacctaaactcgaattaattcctatagccctgtcttgactattataattagtaatataactttctcctaatcctaagcttcctttatcagattgttgtttaaagaacattccctgctttatatcatagctgcttcctatatttaaaactaagtcactaaaagatttatttaattcaattccctctatatcagtataataaagcttagaattatttaaattaaaacttccaacttgatttggtatcatattaactgaaactccaaccggtattccaacatagcatttattagtattgtcatagttataaaaaatctttatacctctattcaaagtattagcactaccttcaaagttaattcctcctggaagcacttcgtatactctggcacttattataagatctgaattaataacattacttaattttgtaatatcttcacccgcagatagtttattaaactctgttgaagcaatagacgatacttcctttagtacatcatcatttgtatcatctcctgaagatattactgaaatagctaaattttttgtatctactattttttgagttattaacttagcatattcttcagatttagttacatccgttccataagttaaagcattaacttgaccttctgttagactccccatattattatctaattcctcataataatctactgttccatcttctgctttagtatatgaataatagtttggattattctctccaaaaataactattcttctattaacatcttgggtgttattaagcgcaaaaagtgcttttcttaatccttctcctaaattacttccggtagagttagtaatactattaattttacttagcagtgttgagtttgttgctccgacaaaataattaggttgagtttccgtcccaaaattagctaatacggcaccagtatcataagtaactaatgaaaatgatacatccgtaatactattaaatttacttaaaaagtttctaatattatctttttgactataagacgaatcaactaaaagtactacttgctttttctttctagtattagttacagaaatatttttagggcttatagaataattcatttgcaacgtttgcccaagctgagtctgaccactataacctgttatatttcttgtaagatcaaatcctatatctaaattacttacagtataattaaatgtaggaatggatttagttatagtactaccatcaacccctttataagtaacagcccaatcactacctaaactagtgtaacttccacttttgctggctttaaatttaaaacttatataaaatgggtctgcaatatatctgtttggagttgtactagtatctaatctatatgatatattgggtaattgccgagtgtaattctttccatcaatagtcaattctgctgtagatcctgtgtattctatgttagaaggtagcgtaaaattaaattttacaccttcaactacgtacgctgatttaatttggtccgcaatttgactataaacttgatcaatggcagttgcatctagtgcactaaagtattttccaccagcactttgagataacgcaagcattttgttagccgaacttcctgaactataagctatttgataactagaatagttattctctttaatttttgtagccataattgatgcataattaaagcagttctcttgagaatcatcagaatttcctggtcctcccacttgctgacttccatcatcttgtaaatcagtgtagtactcccatccatcagaaactttcttatcttctaaataccaccctctactcaaactccatgtccattcttgtactattttgtacttatttttatacatataaaaagtaggctctccatcagacattaatataatatacttcttagcagtactatttccactgttaagcatatttaatccatatcttattccatctcctatattagttccaccatctgccctaagattatttattttattctttaatgtggtcacttgggttgatgaagtcaatccgatactattgttatcataatttgctttagtggaataggttgctatccctatttttacatttgtttcatttttaaacttatctataaaattattagctgctgtccttaatgctgcaatcctagaagtacttccagaaatggcctgactcatacttcctgacgtatccaaaacaagaactatttccttatcagttattacattaatatctcctaaagcaagaggatctggtgttactttatacgttacttctatctcctcattaactttaccactaacatctgtacttgtagttttatttgttttttcatatgttattgttaaatttggtttttctcctgttgcgttaacagagctgacattagtaactattgttatagcaagtgttaaaactataatcagcagattatataattttttctttttaattagactcataatatcaccccctattcgtaaatataaatacttaacggtcatatctaactaattatccttatttctaaaagtaaccttcactttaataggataatcaggtaccctactaaataccttttgactacttaatacaatattaaattcaatcgaagatgtatttgcaaacctatctcctggagctgctggcaccacagtaaagctttttacatgggttgaaagtgttttagaatgattagaagaatcagtccactctacccgtagacttccattatcaaatataatattatacggctgtaaattgcttacattctcatgtccacttacatctttagaatattcactatccttgccataggactctagttttatctcacctatagatgttgaagccaaatctgtatattttttatttacatatctaccatcttcatcttcataatctccatcaatttttatatccgttacacctgtcccctgcataccaattgtcgttaactcttcttggatattccttgcttccatttgtagagcgaatctaacatcggcatctgaaaatactttattcccagtatagaatatagaatatagaattcccagaataatagtagttaatccaattacaattatcatctctattaatgtaaagcccgattttttcatttacaaattcacatcctattttataagcttccaaagcttttcgtctaaatacttggataggtcataatcagcatcagtattataataatgtccatttttaaatacttcttcaaaaatatctagattttgtgcttgaacattctttactacattatcatctttgaatagttttgtatcatttcctgtaatatctaatgttccatttgtaataatacttcctctaaaagtgatacctccttgaatctccacatcaccgtttgtaactataactccatttagcaccccattttttgcttttataactataggtgaacttgaatcatctggaacctctattgaatcttctcctgtagtattttctattattatgattctatcttcattgttaaatatagctttttctgatttattttcttcatcttctaagttataatccaaatcttctatattggataaatctattaattctgatacattaattgcaccatcttctccatctctataatcatcttctgttgcggtttctccaagcttatatactttttctgcatattcaatttgttttgctcctatagcagtttcattatccatatggtaagttggaccttttagttgcttatttccatccttatccttaaatactattgctcctattgaatgaattttacttaaatcagcagataatttaatttctcctacatcgagattatttatattatcaagagcatcccaataatcaacaaagtgctcacctttctcaatgacagttccattaattaaataaagaggattatcatattcaaaatgtaaatttttacttgcatcactacctacacttgaggaataagcttcataatttcctttgatacctattgattcacctgtttcatatttaccatctgtattaatataagccgcccccataatccaggcttcatttgtaatatttatactcgatgtaaatggattactatcgtcacttttatccttattaactataatactactagaatttctcttctttgtatcatctgaatcattatcagtaatatcattaattccataaaaattattaattgtaatatctgtattgtgagcttttaatgttaaatcattgtccactactaaatcatttaatatatctaatttagatttatcaacagctagcccactagcaaaatcttttccctttcccacatatacatttctagcatatagactgccttttatattaacactgacctgatctataatattaaatgtacttctcgtaataacattatcatcaaaagtaatacctttacttttatctatttttattccacctaaatacttatcatacgctatctcaccagtaccagttacttctgatgcatctccttgtacaaatatctgaccattcacttcaatattattaacattaattaaattcatgtttttaccaacaactaaagatttgttatctaaaactgcatacttctttatagactgcatgtaatcaggaacctttattgtatacactgcctggacttgtcttaaatttgttgtttcaaaatttgaagttacttttattatatattcttgcttatcataaacatcaatatttaaatcattattctcctctatcccatctaaagttctgcttatactctttagttcatttttctctccctcgttatagctaattccacttttatccttctcaacatccacatctggagttggatttttatcatcataaacaaaaagtcctggttcttcttgtccatcattattattaaaaactacatgttcatatctatcatcttcagaatctttgtttatgtttttaacgtattttttacctaatatagatttagctaattcatcagcattattaatgtctttagtatcttctaaattattaccacttctatacaaaaattcattaaaagctcttttaaattcttcattttttaataattctatattatcattgtcttctattatattagttcttttttcctcccttaattccctttttgcatcactagttaagtcatcaggaacttcaaggtctttccaataatttatatcctcttttaattttgcatatttttcatcattagtactgttatcattttgaactccactcattagattggttacttgagtatttccatattcaactgctgcattaaaagttcgccctattatattataggcaacatctaacccagactctgcgctatatagattttctaccctttgactttctaccactctgatcttatattcaccagctaccatagataaactagcggtcattactgttattacaaatgcaaaaattataacactaacaattaaggtagctccttccttctttcttttcatttaatcaccaccagtatcaattaatatttatagtctggttatatttttcactaaataattctttatcttcttcatcttttatggtcacagtaacgtcatataaatatcctatcttagaagcagtgtttagactcaattgatttttagtcaagataacttctgctatatatttataatcacttctattatagtagtttccatatacatccaatttttctgttccagaatatctttcagtatttccttgtaaattaaaattatcatctaattcaattgtcgtgtcagaagggttaatacttccactatctgagatttcctttatttgttctattatcttatttccagcatgtaaggctacttgctttttttcacttgcttttgtagtttttataattgatatataagattcatatacacctacggaaagtattgctattatagccatagttattactacttccaccaaagtaaatccttcatattttcgataatttctcttaataagtcctcacctacttctgattaacgcttatattacttccatcgccttcaactgttacccgtggatctgctgaatcatctccacttatatctacatttactagcctatccgtctgatttattatctttaacttaagttctgatttatcatttgaagtaatcctattttcactcagtacatttaatactatattatctgatgttggaataaattccgctccatgcccatcataatttgctggaaatgttccttttgaggttttatatttataataatatttatctccttcttgagttaatatcatttctacattttctgttgaattactgtccgcataaacataagttgttcttaaatcatcatttgtttttcctagcattattgtaggcaagtcagaatttacagatttgactgaggctacaaaatcactagtgtccttattgtcatctatattcccgctcgctgctcctgtattaaacggtacacttttcccataagtgttatttaaatcccattttaaataactttctagctcattatcaatctttggaactgaatagatttcaagattaattgttccttttatagtatctattgtgtcttcacttatttttaatgaatttactacaattttcttttcattttgtccaattgtatttaataatttatttagtccatcataacttccctcaaagtctacttcacatttcatgtattgtactgtattctttttatctttggagcctcttgcgtttgaataatttttagtacttgtcttattattgctattggaatccttagcattactgctggtttgactttgattagaattatttgaacttacataattccgatttgtattgctattttcttttgcaccttcagttatattattatattcatcaactattccttgtagtgaactttccggcaaggtttcactcttcttatctacagtttctacactatcagaaactatacggtcaaatttaattcctccatctaatccactatctttcaataaagtatccaattctaatattatgtgttcttcacttattgaaggataaaaaggtagtgattcatcgcttatttttgcttttaatatttttatatcacttttcctatcttcaattgaatttattgtgctcatagtagtagtatatctcttttcaagttcaatttctcgcttagtcttttcttgaatagactttatttgataagaatatacgaattggtagtatgcaaaacctactattataattcctaagatatataacattattttttctttattacttatcttcatattattcaacatcctttaacacacattttatatcaaaggagtattctccctctactgcacctgaactatctattgaatttacataaacactttgcatttttgatagcgaacttaaattatgctttaattctgcaactgcacttctatttgttgctacaccttttatagttattgtgttatctactatgtctaagttcttaaatgaaagttcacttggtactgttgaacttatatccattaataatatatctgaaacattatctctattcttaacagatatcgcaacatcagtaagggcactgtcatattgctttaatacagttatctgtttatttacatcttctgcttcttttaattgctcttgaatttctgatgcagataatttattattataatcttctatacttctatttagcataattattttaacagtattaactgcaaaagttccagttattaaaattgccactattattattgttccatatatataacgcttaaaatttattttttctttacttttcccttggtaaggtttaaaaaagtttatatctttcatttcatcgcctccttattaaagtcttatgactgaacctatgacatttataaagtcatcaataggtttactatcgtcatttgacttaaaggcaattttagaaagtacttttcttcttgtttttattccaagctttgttgtcatatattcttctattccttttagtttggaacttcctccaaaaataactatattagttacctcatcccccatatttttattcttataaaattgaattatcttttctattttttctatccaatcatccacaatttctcttacatatatgttaattggttcaaatggttcttctaaatctatgtttttaaatttgaaattttctatctcatcagccttaattccgtttctttctaataatatttcgtctatatcatttccaccagcttttatcattctagtaaaatctaaattcctatttttatatatgttaacatcgataaagcttgctcccatatcaataaaagcaactgaatcttttggattatattcatattcactattattatctatgcaattaataaacttatttattgcattatagtttacatctaaagcatgtggctttaaatttaattttataaaaaaatcataatatcctctaactattttctctggatatgcaattactcttacattaagcttttctgatccatttatttcttcttcatttaaaagttgtacttgtaatatataatcttctaaatttataggtaagtattgttgtatttcatatcttaccacagtatccatttcttcctcttctacttttggaattaaaatttctctatttataattaatgtagaattattagtacatatagcatgttttgcttttattccattttcttttaatacttgtcctaatttaatgaataactcttccgatttttttatttctccatctacaatggcacctttaggtgtttttatagtaatatatctatctatagttaaatcttctttataatatattccttcaactatctttatcatagaacttcccatatcaaaggcaatgacttttctctttttttctggggtgcttattttatttattcttttaaagctttttgagaatttgacctttaaagttcctaagtccatattcattaaagctttaatattaattgactctctattttctttaaaacttgcgcccctagtgtttttcttgatttcagacttatcctttttcttcatcattctcaactttccccccattttttcatttttattatttgttttcaaaactaataactttttgcttatataatttgattttatacaagtatattgctataaaatttatatatacttttatgtgtaggttatacttgtaattcctacacataaaaattaagttaatattgatataattaattaaaattatgatattgtatcctcataatccccaccaggtgtaggcagtatttcagtgtctcctgcctttacagtgacttctccgtcagcactaacgctagctgaaaacgcattgcctttttccgtttttgcttttgctgttggaactgtagtagtatcaagcacatctgtgagagtaactgaatcagtgtctaagtctatatcgccatttgcaactgctgctgtaactgcagtttgaatgttctttgctgttgctatgtctgcctttacatttgaattttctcttatttgcccaaatttaggaatagcaattgcagctaaaattgcaattatcgctataactataattaattcaactaatgtaaatcctttcttttttttctttgttgtttgattcattttcttcgccaataattggttcattttaaatccctcctgatttcatattatatatcttaatgcaccctgtaaattagcatatgcattaattgctttttattaaatctgattgtagctatcaaacattggtaacattatagaagccaccataaatccaattataagtcccattataactattaaaagtggttccataagtgctactgaagtttgaattattgagtctaactcttcatcataaaagtctgccgttttatttaatatatcttctaaagatcctgtttcttctcctattttcaccatggaataaagcatttctggaaatattccactttctctcatagatccgtataaactttctcctcttacaactttatctcttatttttaaaagctcaatttcagcaattttattacccgaaacttctgatactattcttaatgcttctacaagtgacagtccacttgctattaaagttgacatagttcttgtaaatcttgatactataatcatctgattaagttttttaagtactggtagctttaacttcagattactcgaaaaatgtataccttcttcactttttaagaatatattaattaaaaatacagccaaccctattactattataataatataccaataatttttaattccactactaagggctaataacagttttgttgaccatggcaatacagtgccactctgttcaaatatttcggtaaaagtaggcattacataagttaaaataaataccactgctccaatagaaaccattcctaatactgtgggatatattaatgcacttcttactttatttgaaattttattttctttttcataatttgatgccattctaagcattatgtcttctaaattaccactcgcttctcctgaagccactaaagatactaaaagatctggaaatacatctttatgctttctcatggattctgataaaacttcaccttttgccacatcatcatttatttctttagtggcttgtcttaatttttgattttcaacttgtgaacttaatatatccaaacatgttagaattggaactcctgcattaagcattgtataaaactgtctacagaatactgccaggtctttaagttttactttcttattgaaattcaaggtaatatttgtactttctactacctcttctacctttaacggatagtatccattacctgaaataaaatcaataacttcatctctagaatccgcttcatagcttccttctattttttctccatctgggttcatcgctctgtatttaaattttgccatataatcaccttcctttcaatgcacagtttacaattaacaatgcagaattaataatgaaatttcgttagaatttcttaatatatttttaagtccattaagaacctgcccttcatcgaaaataattcattgttaattgtcattggatagcgttactattgttgctagttcttctattgttgtcattccatttagcaccagatccttacattcactttctaaagttttcatgccattttctattgaaatatctcttataatatctgaattttcacctgaatttatagcttctctatgttttcttgtcacttccataatttcgtaaataccaattcttcctgaatacccggtattattacaatatccacagcctgtacctttatatagagttaaagtctcgcttatatttctttctaaaacctctttctcatatttactagcttcatacgcttccttacagttattgcatatttttcttactaatctttgcgcaataactccaacaacagaagttgaaaccaaataaggcttaattcccatatctacaagccttattattgatgagggcgcatcatttgtatgaagagtacttaaaaccaaatgccctgttatagctgctctagtagctatttcagctgtttcctcatctctaatttctccaatcattataatatctggatcttgccttaatatacttcttagcccacttgcaaaagttaaccctgctttttcatttacgcttacttggttgattccattcatggtatattctactggatcttctactgtaattatgtttacactattagagttcaattcatttaatattgaatacagagttgtagatttaccgcttcctgtaggtcctgtaactaatataattccgtgaggatttcctattattctatttaatctatgaatattttcttcactcattccaagctgctttttatttaatatcgctccattggtgtttaaaattcttattacaatcttttcgccattaaccactggaagtatggatactctaaggtccacttgagctccatcaacctcgaacattatccttccatcttgaggtattcttttttctgctatattaagacccgcaagtatttttattcttgtaactaaaggtcctaaactttctatcccaagtgtattaacggtctgaagctttccatctattctataccttattcttatttcattttcaaatggttctatatgaatatcggaagttttcatttctactgaatttttaaacaggtaatccaccattttaactactggtgcactattaacttcgctcatttcatctatggcttgtttactatttttgactgctttagtactttcttttgccagttgaatagcagcattgttaacctgctgactactataatatattcctataaatttctttatatccgcttttctagatataaacgactctatgtcaaatcctgttgatattgcaacatcatcaatagcaaagatattaagtgggtctgcgagggccactttaatcttattgttatcaaatccaaatgggatcaataagtatttatcacacaaattttgaggaattaatgtaattgcttttctatcaaaatttattgtgtttaaatctacttttttaattcctgtctgttgttctattgcttctattatatcttcttcagttataattttactatcgagtagtatttctcctagtttcttccctagtgtcctttgagactttaatgcttcttgcaattgatatcctgtaattttccccgcatttacaagaatgttacctagtcttcttttctcagttgccattctgtgtctcacctttcctatgatttataaataaaatgcggtataacaccttataatcagtataagtttgctatttaatttacacaagtaaagttattgtaaaaaagtgtatcttcacattaacacattccaatagatttttaatatttctgctccatagagcattgaaatcaaacttcctattgctataaaagggccaaatgctatcttttcttttgccttctttaattttagcgctaaaacaattattcctattattccacccagcacaattgctagaaataagcctaataaaatccctttaactcctaagaacactccacacacagcggcaatttcaatatcaccttcacccattccccttgttaaaaacactattaatcctataattattgctcctagtattcctcctagaattaaatccagaacattattcttatataaaacatattgtaataatataaataaaatgccaactattcctccaaaaatcgtggtgcttgtaaatacgaactgcgtatcaaaatctatagcactaattacgattaaaagagataccaaaatacaatattttatagtgattagatctaatccaaactttacatatacaattaaatacatcaatccatttaaaatttctataaaagggtatcttatagagattttctcaccacaatacctacatcttcctctaagaaatatatagctaaatacaggcactagatctagtggatttaagttatgtttacaggttgtacaatgggatggtgggaatgcaattgatttttctataggaattctataaatacaaacatttaaaaaacttcctataactagtcctaaaatacatattaatgtataatccaaaaaatcacctctcattgtacattttaatattatttaacttttttgtaaacgttgttgtatataaatttgtattttattctcattttttcaaaatatttaattaaaattacattaagataataaagattcattctcttattttaatcatagttagaaaaagtacatcttcaatatatctccactatatttgtaagtatattacaaattctttaaaaaaatataaaaaccggcctttataaaatataaaggtcggttgcactactaactcaccatatataaagtgcccaattaaaatatatggatcaaagtttccttataacaaaatatacttgttttttcttttatttcttacataacatattaaatacagccaatatatgccatagtaattataccataatgatcattattgggtctatcttgtttaaaactttttcttctaaaatattattaacaattatttactgtacagacctacattttttgtaatctttcatatataatttggaataattgccatatatatttctattccataataccatgtttacaaaaattttacaactattgaataacattgttaatcgcgttttacatatataccagaggatcttagtttctacttgtatctttaataaatattgatttatattaataaacaacaaatatgctttaaatatcccttctaaatttcatctattatagtttaaatgctttctactatagatgcatatctttttaaatttctatcatatatttatcgttatcttgtagttctttactaagctcctaaatgtcgcttagcgataatcttttttcttcatctatcctatagcttataatttattaattttaatgttttaattcacgaaaacgtgatataatataaataagaaaagttagtgctgcaaacactaactttccctagaacgtttttaagtttagggctattagatttttatttggttagaaaaagaacgcttaatcttggtctgatggggcgttcttttctgttgtcttaaaatttattttaaaaccttttatgttaacatcgagattaaactcacaatttttagaattacttcttaaagctctattaatcagtataactaatagtatcaatattgatattattaacaatccaattatcacaatctaataccacccccttagaccattatttctaacagcccaaggcggaaaacgcacaaccaccgtaacccatctttacggaatataggattattatagcattattgtattaggattaaaataattatttactagaacaatgacttcagtctgaggtctttatcccttaaatagggggtgctttaaaaccccctatatttatatgtagtattccaaaatatagtaatttgtaaaatggcctagaatgaccctcaattttttatcaaggttcattacaaaaaatgccatattaataacgcactcagcagtttcttttaaatctgcaaatattctggctaaaccatatctagttttaccagtaccaaac

SEQ ID NO: 118 - DNA, 16267 bp, Clostridium beijerinckii
ataccgctacttatatttcaaagacagtatttccttagtcatcagttttaatattaatccaagaaggtataagttacttgaaatttaatttcctatgatttatactcatgttaatacctagagatatatctaggtcaagctttttttaataaattttaaaggggattttaaaattgacttatacaataaaagatatatcaaaaatgtttggcgtttctatctatacaattcgtttctatgacaaagagggtcttctgccatttgttttgagaaataaatcaggaaacagagtttttactgaatcagacgtaagcctgtttagaacaatttgttgtctaaagaatactggcatgcaacttaaggatataaaaaaatatattgatttatgcatggaaggttctagaaccatagattcacgaaaagaattacttttaaaacatcaagaagcaattttaaaccaaataaatgatctcaatgaaaatttagaccttattcataccaaaatagtgaagtatacatctcctaacgcggcgcaaattattaacgaagaaagaaaaaaagttcatgaggaaaaacgcgaaaataacttgctattataacatctattatgctatcgcctattgttttatccaaaggcactccattatatgacctcatcgatgttcttgcttttataacttctataattgacttcttgaaaatcggattatctaaattcatatttcaacactcccaccctttttattttatagtaagtccgcatttgaattgctaagttatatgctaagaatgtaactttaacttagatattaatcctttagttatgaatttaactgcaccagcctgacaatatgtttcattaagatatgattgtgatttatgaaactctctacaggctttacaattaccgtgatttttacagcttttatttatgcatttacagtttggatttatagttgacatatttacctccaagtaataaatatttatttcaaacaattattctagcaacctatattgcaaaaacaactcgtgttgcttataatgattataaatttagcttatatatttttcaaccaacaaaattgataaagtgttgcttgcataaaactaaatctgcaatatgagtttaactaaaattcttttaaatgaggtaataatatgtcagtaaatataaataatcctagagtaaaaagaacccgtgatcttattatcaacgcttttatttcactagttactaaaaaaggctttgactccattacagtcaaggatattactaccgtggccaccataaaccgtgcaaccttctatgcacattttacagataaatatgcactactggacaccgtcatagtagagaaattctctgagatcttttcccataaactactaggcgagatgcgcctaaatgagaatactatacgaatcctcattctttgcgtttgtgagtactttgaaatggtaaaaagcatctgcaagtgcggttttgcctctattttacctttaataggagataaaatatcttgtgagctatattccataatctatgagatgctaataaaagaccatgaattagctgaaaatgaacaaatacgtgcccaattagttgcaacaatgatgagcacttctatttataatgtaatttacaaatgggaagttcagaatagaccaatccctcaagaacttctaatttctgagattattgggtttatttctacaggtatgggtactttaaaaagatgaaaagaacattatatcaaatagtgttcttttcattttttataggctctttgcaatgaattttctattctgtctaagtattgtaaccatctattatcaccaaatgatacgccttatataccactttgaaattcaccattttcaaaactttttcgcaaagctcttatatgttttagtggcggctgtccaaataaccgcttatattccctggtaaattgagatgagctttcataaccaacttccatggcagcagtagtaacatcaatagaatcactaaacatgagtcgtcttgcttcatgaagtcgcagctctttctgatattgtagcggaccaatggcagttacagctttaaacttatggtgcagtcctgatacactcatattatttgattttgctagctcttccacggtaaaagaacgtttataattttccttgatccattctattgctttacctattccatctgcctgctgttcagctagaacctgttgaaaaaacaagtatccgtactctccactcaataagtgataaatcatttctcgcttaataagctgcgataaaaagtaagtatccttagatttatttattagcttcaaaagtctgataaataaatctaatagttcctcatctgattttcctacaaatgctcctaaataaagattcttattttttatgttaaattcaattttagcatccagtattacagaagcaatttcacttgtagtaaaatcaatacgcagactaatacagggcaactcttttgatgctcctatcacttgtacggatacaggcatatcaataatagacgctgcaaaatcacctgcattaaaatgtatagtctcatctccgaaatgaaactcctttcttccttgaagaataatactaaatgcaggattcataactccaggagttataggaatttcatgactgtgcctggtaaccgaaaaaaatgggactattgttttggtatttccatcaattttagctatcctctctgtcattccaattatagtattcaatgtcttttgcttaataaagttactttcttcaaataatacttctttatttaaattttctttttgttctaacatttatttctcacccagcctttatacttaaaccatttgctgataatttccacatcttatttcatttatctaactcaatgataatattccttaaaactatagtaaatattatatcaaaaatcaatttgttttttcatcaattcattgaattaatactttgcagaattaggcaaattttaaacattatcgttatattatgttttgatttttaatgtgataatatggttagtcaaacttgatgtctaaactattaaattttaataaaagagaggtataaagaaatggaacaaagaacttggtttataactggtattaacagtggattcggacgacatatgactgaacaactccttgagaggggcgataaagttgctggtactgtacgcaatatgaattcagtagaagaccttaaggaaaaatacggtgctcttcttagagtgtttcatcttgacgttacagacaccaacacaatttatgaggttgtcgatcaagccttcaacgaacttggaaaaattgatgttattgtaagcaacgctggttatggccttattggtgcagcagaagaattaactattgagcaaattactcatcagattaacacaaatctccttggatctatccatttgattagagcttcattaccacatctacgtgctcaaggagaagggcatatcattcaactctcatcatcagcaggccaaactgcattctctggaggatcactctaccatgcaactaaatggggaattgaaggattctgcgaagccgtaagacaagaaatcgctccttttaacatcagtcttacaatagtggaaccaagcggagcacgtacgaattttacacatcatagtgtagtattgggtcaaaagttagaggcttactcgatttctcaagcacataatgccagacgcggttttgaagatacctcgatagttcctattggtgatcctgctagaatggtgaaaatcatgattgacagtgctgaccaaaagccagcaccaataagaattgctcttggcagcggagcttataatacgatacatcaatcactttcaaatcgtcttgaagaacttgaagcacaaaaagaacttgccttttctactgatttccctgctaataaataaaaagtagaaggtagaatcggcagttaaagtgtcgaatttgttagatacaaaattaagtatatatttttgaaagcttagtagaaacaaataatctgctatcaattcgtttagttgatagcagattatttcataaattgattaaatattaattataatcccttaacgcaaatattccaatttctgcgtaaaagttagactaacataaatcaaaattctcttaaaccattgaacaatacttctacttcaatacggttcatcatacaatattttaaaaaagtctacatcccttatgacatggttcaccgtaacactcgcaaatgataactctttttcctttctcatctatataaaaagttctttcgttgaaaaataaagaattcttatttagatgcttcttatcattccattttcaactgttacgtcatataaaaatattaatgtttaatttaataagaagacactaagaacacaaaatacatacctttgttatttgaattcaaaatattatattaactattcatcatttctttactcatgtctataaaagctcttaatgcccttgaaacccatttatccctatgatataccatttgcgttgtcaaataaaaggaatcttcccaccaatgaagttctatcaattcatttcgtttcaattcctccgcagcagcaatctttggaagcagcgttattccaagtccgcccattgtcaattgtttgattgattggatactgcccatttccattattgatttcggagttaccccagcatcattgagactttgttcaaaaagatttcggtaaccgcagcctttttctgcaacaactatgttacagtcagcaatatcttcaggataaacatatttcttgaaagtgagtggatgtcctggggctactaacaaaactaaaggttcaggaaattccaattctgtaattaactcaaaatcattgattttctgaccaatgataaaagcaacatcaatctgattttctcttatcaatgttttacatttgttattgccttccatttttagaataatttcaatctccggataacgctcatgaaattcctttaatataggaggcagccttacagcacaaagtgattcattagcccctattgtcaaagttccctttactacatctgatgtaattaaagtgctttttgcttcatcagaaagtttaattatttgcttagcataaacaagaaatttttccccttctgaagtcaaagatatacttttccctaatctttcaaacaaattaacacctaattctttttccaactgttgtatctgagcagtaatagcagattgtgaatatcctagctcaaatgctgcttttgtaaaattactcagtttagctacggtaataaatgcatttaattgacgaaattccatttctatatccccccaaaaatcaatcatttattttgattgttacaatttaaactattgatttcactaattattagtagcatgatatcatattgttactatcttttcaaatttaatcattaaggaggtaagctatgttcaatttatctgcacttttatcttatgttcttgtttcaacttttacgcctggtccaaataatattatgtctatgacaaatggtactaactttggatataaaaaaacatttaaatttgttctaggtgctacagctggtatggctgtgatcatgttattgtgcggttatcttaacttatttttatttaaacttctccccaacataaagttgtctatggaggtatttagttcagcatacataatatatttagctatcaagatactcaaaagtaattctaacccaaatgcaattaataattacaacatcaacacatttaaatctggaatgcttatgcaattcatgaatcctaaaacaatactttatggcataacggtgaattcaatttttataatcccctactataaatcgagcataatattatgcttatttgctatcttcctctcattagtaggatttatatcgatgtcctgctggactctttttggtgcattatttcaaaaagttcttagccgtcatagaaagttatttaatattgttatggcatctctcctaatatattgtgcattatcagttcccgattttaaacttctaattcatttatttatctgatgtctagacggggtaccactttgaattataataaaagaaatgcaaactaatcattaattttaaacaatactgccttctaatatattgctgatggttccgatattttagtgtcttaaagcattttttcttagtatagtaatcttccatattttttataatagaacaagccttaatcactgtttcactggtaattaaggcttgttgtccaatcacataatcttttaaattttgtggtgttagttctacttgaattatcaagggatttgtataagttccaccattactacataccatcttatcagcatattcagcaataacatcggcgaatcaatgtaatacttatactttttttcttcaagttctttctcttcctctacgactataacatcccctcacccatcttcatatttatttctgtatcccccatattcattgtctagtttctgtaatatatcttgaatagtttcttgtacctccttgaaaataaaaatactcttaccatatttctaaggtaagagttttcaatagaataatatatacattttctatcatttcaaagaaaatcccgttatttatggtatggttcaccgtatcagtagtaagtgataactcattctctttctcacttatataacaggctcttttattgaggataagaagcacctcttagatacttcttatcattctacttttaactgctacaccctatgctcgtttggagtagtagataagcatagcaagaatgacttcttgacttcctatatttctgtatgaatgagttatatcagccttaaatctaatggaatcaccttcgtttaaagaatacactgtatcgccaactgtgacttcgatattaccactgaatactgttatatattcttccgttccggcaagatgagcttctgcttgcaaacctccatctggagcaatcacaatacgataagtttcaaataaacgttgttcgtcaaaggtgaacaacggataatttatatacttcccgctatcctcaacaattggagtgatatccttgaatggcagaatagttgcttgtttttcggattcttcaattagagaagtaaacgaaaccttatacccattagcaattttccataatacagataatgtgggattcacatcccctttttcaatttgtgctaacatactacgagatactccagtcgtcttggcagctgcatccagcgtcaatttcttttgttcccgaatatgctttatattttgagaaaccgtggtattaatatccaaaaaatcttctcctttcacctattgacactatatcgaactaatagtacaataaattagaaatcttatatattgtactttaaatacattatatcatcacagtttaaaggaggcaaattaaatgtttagttggatcaattttctcacctatgcaataattacagcaataacacctggaccaaacaatattatgtccatgtccaacgcaagtcgtcttggtttcaaaaggtcactaccgtttaacatcggaatatgggcaggattttccgttgttatgcttgtttgcacactatttagcagtctgctttctttcgtgctgccaacgattaaaatgccaatgcttattattggtgctgcctatatgctctatttatcatggaaaacattcaaaagttcacccgaaattatggagagtcacgcacgaagtggatttgggtcaggtttggttttacaatttgttaatccaaagatctatatctactgcatcatttcaatggaagcatatatcttaccgtattattccaaccaattgcttgcgctgtttggatttgccatattgttggcatttatcgggttttcatttacgctgtgctggtcgatatttgggtcaatattcaagcagatattttcaaaatatgcaaagataaccaatacaatcatggcacttttactagtctattgtgcaatatctctatttttgtaaaaacagtagatagcacaaaatataattaatggttagttcgtagtttaactttaccattgcgaattaattctaacatgtttttaatcagtatcttcatatttttgttcattaattatatacatatttttatattcacaggatttatcatcaacattctttttgaaacaacagaaaaaggagaacctcctccatctgaacttggttctcctacattaattaaatacattattaagttatcatttttaaaggaaactcgactcgtatacactcgcttagtaagtgattcacatcaaatcatagatttgagttctctacttaagctctattgactctatatctctagctttgtttattgttatttttgaaatcaacatatgcaacagccttttttgttgctccttgaaggtaactctccgaattcactttacttacttttacttattatcctttatttatgatacggttcaccattaattatcctaaactttgctttgtatttaagtattattatctagttgcatcaacttgctattatgaacacaacatattccaacttaatatgatactctttaaattccattatttaattttaggatttatcatttttatatagtttaatcaactcatctaaagaaatatctataccgaccatttttaacaaatcctttcgttcattatatagtttttcaagcattacttcaaaaccttctcctaaatgtatttgtttgtgacaattacagcataaagaaacaatgttttcttcgacatcaagagatatttcaaaattattgtggtaagtaattggtactagatgatggggttcagtataatttatgtccgaatttcttctaatgaacgttaaatgagtattatcaaattcacatttatactttgcgtgtcgcagcgcatttattgacactcttcggcttctaggatacacatatttattttgaacataaacaggatctttcttatttttagatttaccactatattcaaaatgtgtggtatccgaagaaaggtcacttttgccgatatctaaaataaggtcatcatccgaataactattatctgaaaatatgtttaattcttcaatagcttgaacaagctcttctcttaatgtccattcccaagtctttggttttgtatcaatttgtttgcttttcatcaccacaataaatcttgtacctttagctatatcaccttttcccttaacaacgaaccgcccaatttctttctgcactcttccagccaaaccatttataattccattagcactcatactatgctcattatattttttaccaatataaccacaagtggcagagtgtccaggttctatgtaccattttcttatagcttctttacttttatcatcaaaaactctagaatttgttaacaattgcttccattcatcagtagttatatcaatatcgcagtgatactctccatcaataatttcacatattttttcaatcatatgcccctccaatttttaaatatttaatatacttaattttataattatactttttgtattaatccaacgaacaaatatcgaacctatgccaagttatagaaatgcatttctattagtttcttttttctgaataccatttttcatgggctcttggaactttataagaatggatattctaaggcataaaaatatactacatcaaaactattatctctttgctttaaaatataatcttcatatgattcattaacaacaataatttaaatgcattcatcttcgatcaatattgatattccattttcttaaagaaatccacttttggttcaagaaatttaaacttatggttatcagcatctttaaaataagaagtaataggttcaaatattttatcccaattccatagttcatcatctatatttagataatctttaaacatttcacatccttctggtgctatagggtgtattagtactgctataactttacaagcgtaaaaacaatctgatattacgtttctttttaattcctcatttttaatattactagcccaatgtttatttacttcccttatataatcgtccagaacatatgctattctatgaaaatcttgattatacatatgtctttcatattctaatactgctttttctgttaattctttaattttttcacttacctcttctttaggaatatcttcattaagactttgcaaagtataaaaacatgagcgaataagtctattaaatacatttgttaaaaggtttccttcttttaatactggatctgctcctactttttcttcttccttcatgtaaacttgtggcttaaaaccaacactttttgaagataatccaagactcataaagtgcatgcgtaattgatcctttgtataaaatttcaataattcatctgccattggtggcttaatatctgaactgctgcttgcttttttatccataaataaaatgtgtttattcgaaacaatgtgtggtaaatttagcttagtaacatctacattttcacccttaggcacctttaagccaataaacatggccatttcggcaattgaataaaaatatatattatcttcccctataaattgatataccattgaatcatcattatcccaccaattacgccattcttcaggattcgtaccctttgactccaaatatgcttttgtaaaagaaattggagcccataaagattctggccacacccagaaggttaaattttttaaatcttctttatctggcacttttactccccactctatatttcctgataatctaaaaggaaccaatgtcttaccactagtatagttaatgtttaaattatccaatatttcttttgccttatccctatcctctaatgtttggaaaataaaggctagtgaagattttttctcttcatctattgtttcatggcttggaaatttagcttctagatcatttacatctttaatatattttcttgggacatatattagtggcttctttaaaaattcatctatagtgttaatttcatactttcgtctattagtattcttctttaaaaactcattaagttcctccattatatccatggattcatctaaggtaaaataccaattatctacactttttaatattggtttatttcctgataaagtgctaataggattaattaattcagatgccatatattgatgccctaatgaacattcttctgcataagctttatcagagttacacccagctattggacatttccctattacttgtcttccattaagaaagattttcttatcttcatcataaaattgcaatgctgacatcttctttatataaccatttttgaataaagtattaaatatttcttctgaaacttcattatgaaattctcctgtccttccaagggctgaagcaccaaaaatatttaagctgatattataatcttctaaggttttcttttgactcaaatgatttgccttaacatagtcctccatagtattttcgtatccattttcctttagctttctgtagctttcaaggataggtgaaccataacaatctgtaccagatacaaaaataacattttctttccctattctgtctcttaaaaatcttgcaaatatatctgcatgaataaacattcctccaacatggccaaaatgaagattcttatttccataaggcattccagctgttactatagccttctttggaaatgttggtctttcgcttttttctattcttttacttatcataaacttctcactccttaaatttctaactttcatactttggataatcaaaaaataaaatatctatgctattttaaacctataatttttcatatgctcaattttaacgtcaaaaaagcccctgtagaaaatacttctacaggggcgaaacttctatttcgcgatgccacccttttccctaaaatgtcaccattttaggctcttcaagtacaccatctccctaaaattatagaattatagggcaaatcatactctggttctgtaacgtgaacttacgtcatagcatcacttataatgaatttttatcttataggtagagatccgtaacatcacttcttcttcaaatgtgagttataggttgcactctctaagataagttaaactaaattcagcgaaaataaaatttcacctaaaaaagttttactttataagatccgtatgcagctccgagacttgtttcattatgatttcataatttcctcacaccaaatggaaactctctgagtattccctcataactactcttctcttcatagcttttatttttgtacaattatataccttataatgttaagtgtcaattatattacttaatagttttttatctatttgaaatctctaaaactttttatcctatagatgtgtgatgcaataatttttaacaaacttattaaaggcctttttggttaaaagtatgttttgatattaattatttgggctttaactagtttttagtatgttcttctgaattgttttaatgtcttcttatatgaataatggtaatctgaattctattaatgcttgatctacgcttcagcagctattgataactctataaattggaatttaccaataaccaaatatcactatcttactgttcatcatctataaatatcctcaagtctaactctgcataattcctgagcttaagcattttcaaaatctttttgtacatatctttgaagtactttatcatttatttcatggtaaacttctgtagatgcccaaacttttgcaaattcaattatattataatattctaaatttcttataggttctattaatttttttataagtattaagcatttaattgtttcatcgtcaagattatctcttattgattttgctaattcaaatgatagaattaagtcaatatgttcaggtatcctgccatctaaaaccatacttacgcttttattataaaatttatcaataatatctttttcttcaataagcctaacttgaattaatcctttttcttctatagttgtaaaaagttttgctaatcttataaataattggtcaagtttattctgcattttttcaccaccttgtttgagtatttattaaattataatttattgttcaattaatcctcacaacatattttctaaatacaatactgctcagttctaagaaaacaagttttatttgtcgtccccaataccaaattcatattatcagcctaatgggtatatgaataatgggaagttttctttataatgaataccaattatacttgaatcattagaattatatacaaatgtaaatgcatcaaacaatatcataaaattctatggaatctttcatctctatctttcttttattaataccaaattttattaaattcttatacatctgatttattttatctttatcgtaataatataccttccactttgctttagcttttgtataagaattaattgtactaaaatatggcatatctacacctgctaatgaatgtccaatcacaattacctcttctattttttcattttgtagagaaactaatttatccatatagttacttacatttttatatgtatcattataatactcctctataacgctacttatacttgattccctttcatcaaatatttcatctgctttttcatgcctttctttaatctcctcaattcttttatgatttccatgacctattattggattaccatcacgcattcttagtgacccatgaatatgtgtaattttattcccacttattttatatacattttccaaaacacttgtataattaaaagtaacatacatatcactgcttttagattcgattattgtagttcttggcaataaatcacgtattcttatactttgtatccaaagttttagataataaggtaattgttttatatacctaaagtcctccgaaaaatatgtatataacgtatcttcaattccaatatccccactttccaatcccatatctattgatactgcattttctattattacgtcttcatctatattagctaaattactttcaaattcattccaaagcaattgttgcttttcttcatctgaaaaaccaggataaatattataattactttcaaaactatataaaaaatcaggataacatttttccaaaaaagttctaaaatcccaataacccgtttttaaattatgacctctatcaaatccatttccaataataaataatttcattagctcccccctattctcctcaatatatctttactttttaaataaagttattatatactttaatttcttattattagcctaatgtgtatatgaataactaaaagttaaagttcatcagataattttatctttatcaacctccaattttcatactcagcatctttattaacccaactatcaactattgctttcttatttctacaatataatgaaaattcgatttaccaatcaatatgagaaaaaattagtttgctgtattaatgtcttcgtttttcttactactctttttaatatagaatataaccctacgatagtaatttacatctgttttactagactctttaaatactgaaattaggtccatcaatttgtttattaactcatcagaaaatgccttgtcttctcctagttgtcgcacagtaataaagaattcttgcataatataaggagatttatacttaaatgactctgacatgtcagtcttcaatttgttcataaagtcattaatcttatcttctatattataaaatgtgatgttacttaaatctaaatcttccgtagtaactaattgttcctcatttataaattgcataatcttttctaggtattcatattctcttacttgcgcgaaagcttcatctaaatcattttttatatcttcttcttttagaaaatccatatttatcaattcttctttacattcatttacaaaccctttaatcatttcgactggagtattcccactacttttaaaatatggttttaattcttcacaaaataggtctaatttttcataaaatcctcttccattctgtgatttttcttttgcacgcataataacatcaatattgttattattatcagtcaaatgatatgaaagaattttgtttaaataaataaaagacgttcccatataatttctacaaaacaaatttacttcttcttcaacttcacttgaattatttaatataatatttttatcacaaaattttttgtaaaacaattgcataagcattaatttaggattacaatatcttcgagctccactatttgaattaaaaatattaaaagcataaccatttccactttcattctctataacgcgctctgcattatcaaacaatttctcaagtaaatttgctcccttatcactattcacatatgaataattcctcataattattgaaaaaagttctacaaaatcaatatcaacatcttcaaaattttcatcatcaattaatgtaatatacttgtcatcatatgatgtaaaaccattgactactttatctaaatcatgggggttctcaaacaggcaagtcataaacttcattatttcataatgtttatatcccttgattgcttccctagaatactctatgtaccataattcagataccaaagaatttattaattgatcttcaaaatctttagttgaattcacatcacataaaaaatcgacataattattaaaaccttttgtatgaatgtagtcatacttttctggcataaccgaacgtataaatgagataataacaatatttttagctgcttccactttctttaaatatttttctacaacatctccattttcatatttattttgaagttcttcatttataattttacattgttcattaatatagacaaataattttgaaatcgttcttggattactcaatttattttgaataaataaagcttgttcattaagtaattttttctttatgttattcttttcgacttcatcttttttttcttttctattgattaaatatggatatggattaagttctctcaactttttttctattattgaaatttccgataaaatttctgaaatccacttatctatttcacttaaaatagatgttgatatgtctaatgaaaaaagtttaagatttgatagatttttatgtacaaaataacttacaatgtccgtataactaactgtagccaaattaattatatgattaaaatatttgtcaatatattctataggtttatctaaactattt

SEQ ID NO: 119 - DNA, 16013 bp, Clostridium beijerinckii
gaattctagttaataaagtttttgaataagagtagattctatatatttagctaataaaatatatgattctatagtaagaattcttattttttatgaaaaagtcatttaaattattgaagttcatagaatcaaataatatattaataattataaatttattaaaataattaagtaaatttaacaaaaaaagcaaaaatgtaataataaaacgttaccaattgatgaaagcataatttttaaaaaaagtcattgaaaatcattttcaatgagagtgaaaagtgctattattatttatagagaagttaattaaaatcattatcaattgattgtgactttaattggcgataaaatataaggaattatacataaataatttatgcaaaaattagtgaatctaattaagggggaagcattatgccattaatattagctaataagggaaatgaaatgaatattaaaaagattactggaaatgacgaaacaaaaagatttttaaacagtttagggtttgttacaggtgaaacagttaaaattatttctgaacttggaggaaatctaataataaatgttaaggatagcagagttgcattagataaaagaatggcaagtagaattatagtttaggaggatttttataatgaacacattaaaggagattaaatgtggacaaactgttaaggttaaaaaggttgatggtttaggaccagtccgtagacgtattatggatatgggaataacaagagggtgtgaagtgtatgttcgtaaagtggcaccacttggagatccaatagaagtaacagttcgtggatatgaattatcacttcgtaaagctgatgcagaaatgatacttgtagagtaattcaatacaaaaaaatatataccatagttcaatttaataaagaaaggtatatatagtgatgaggaggaatagaaatgtcaattaaaatagggcttgcaggtaaccctaattgtggaaagacaactatgtttaatgaacttacaggttcatcacaatatgttggtaactggccaggggtaactgttgaaaaaaagggtggtaagttaaaaggacataaggaagttgaaattgtcgatttaccaggagtttattctctatcaccatatacacttgaagaagttgtaacacgtaattttatgataaatgatagaccagacgcagtaatcaatattgtggatgcatctaatattgaaagaaatttatatttaacaactcagattttggaattaggaatccctaccgttatagcacttaacatgatggatattgtagagagaaatggggataaaatagatattaataaattatcaaaaactttagggtgtccagtagtagaaacttctgcacttaaaggaaatggagttaaagcagcggcggaaaaggctatcgaaatagctaattcaaagaaaaagccgaattttcaagtgcctttttcaaaagaagctagggatgctttcgatgagatagaaaaaattgtccaaggtaatatacaaagtaaagatactaatattaattggctttctataaaattatttgagcgcgataaaaacataatagataatttgaaacttccagaaaacatattaagtgatatagaagcagtaatacagaaatatgaaaatgaacttgatgacgatagtgaaagtattgttacttcagatagatatgcatttataggagatgtagtttcaagtgcgattaaaaagagcagcaatggaaaagaaacaacatcagacaaaattgataaaattgttacaaatcgtttcttggcattgccaatttttgtggttattatgtacgcagtatattatattgcaataacaatagggacaataggaactgattggattaatgatacgttatttggagagataattcaaggaagtgcttcagattggatggcgagtgcaaatgtagctgactggttacaaggattagtcattaatggaataattagtggagtaggttcggtaattggatttgtaccacagattatacttttattcttattcttatctgtacttgaggactgcggatatatggcccgtgtagcatttattatggatagaattttccgtaagtttggtctttcagggaagtcatttataccaatgcttattagctctggttgtggtgtacctggtattatggcaacacgtacaatggaaaacgagagagatagaaaaatgacgattatgttaactacatttattccttgtagtgctaagttgccaattatagctttaattgcatcagcattctttaatgattcagcgtgggtagctccatcagcatatttcttgggaataataatgattgttgtttgtggaattatattaaagaaaacaaaattattttctggagatccttcaccatttgttatggaattaccacaatatcatataccaagcgcaaaaagtgtagtcattcatatgtgggatagagtaaaagcatttatagcaaaagccggaacaataattttagtttcttgtgcagcagtatggttcttacaatcatttaattggtcattcgaaatggtagacgcagataatagtatattagcaagcctaggaaatattattgcacctatatttgcaccacttggctttggaaattggcaatcatcagtttcaacagttacaggacttgttgcaaaggaaaatcttgttggaacatttggggttttatatggaatagcagatgcatctgaaactgatccaacattaattaataatgttggtgcaatgtttacagcagcaagcgggtttgcatttatggcattcaatttactttgtgctccttgtttcgcggcaattggtacaataagacgtgaaatgggaaattggaaatggacatttattactataggattccagacagcaactgcatatatagtggcacttgttattaaccaagttggtaattatatattgggagttggaagtttagttggagctgtagtttcaattataattgcagtagctgtagtatttatagttatagcaacaggaagaaaaggatcaaaagaaaaagtagttaatgctaatttaagttatacaaaataatgtttatacaactagatttaagtataacggtttacttagattaagatttgaggagtgataattatggtggcaacaattatattagctggtataatatttggatttatggcatttgtgatagggaagcaaataaaaaaagctaaaaatggagaaagtggctgcggatgtggatgctccggttgttcatcagctaatgcatgccacggaataaaaataaagcaaaaataaaatgctaataattaaatatgttgcaattagaaacctatattttagtattaaatgagaaattggcttattaatatattaaatgtaaatattgcggcatatatgttaagtagttgtttaaggcaactactttttttattctccagattctaaagtctcctatgattttgttcttttcttgaagtttatatttgtggagagaaaactgtgggtactgtgttctatgttaatggaatttttttgaataaatgtattgacaaagtgaataatataaactatagtataaatcatataaatcctattgaaataatagggattgaaacacatatcagtataaccaataaaataatacgaattattgatgttgttataaattctttaattgagatttagataggcaattataactaaaagcctactaaacatatatgataaataatggatttgaaaggggcaaatgttatgaagaagagaagaatattaagtgttacgctttctatagctttaataatgggggcttttataggttgtggaaagcaagaagctaatagtgaaaattcggacagtaaaaaacctgtagagcttttgaatgtatcatatgatccaacaagagaattatatacaaaatttaatgatagttttataaaatattggaaggataaaactggacaagatgtaacaataaatcaatctcatggaggctctggtgcacaggcacaatcagtaattggtggattagaggctgatattgtaaccttagcactaggctatgatatagatgctataagtcaagctggtcttgtaaatagtgattggcaaagtaaatttaaagaaaatagttcgccatatacatctactatagtttttcttgttagaaaaggaaatcctaagaatataaaagactgggatgatttaacgagggatggagtttcgatagtaacaccaaatccaaaaacatcaggaggagctagatggaactacttagcagcttgggcctatgcatcgaaaaagtataatggtgatgaaaaggctataaaagattttatgtcaaagttatattcaaatgtaacagtattggattcaggagctaggggagcaacaacaagttttgttgagagaggattaggagatgtacttatagcatgggaaaatgaagcacttttatcacttaatcaacttggaaaagatcagtatgaaatagtagtgccatcattaagtattttagcagaacctcctgttgctgtagttgataaagttgttgataaaaaaggaactagggaagttgcagagggatatttagattatttatatactaaagaaggacaagaaatagcagcagaaaattattacagacctagagataaagaagttgctgaaaagtataagagcacatttccagaagttaatttagttacagtagacggtgaatttggaggatgggcgaaagctcaggaaactcatttctcagatggaggaacattcgaccaaatttatattcctaaaaaataatgattcaatagttaaataatttaatattaattttataatcatagatacaaattttggtgatttcgaaatataaataatattttacaaaataacaatttcaaaaacttactggataaaatttaacattttcatttagtaagtttgatttttgttaaaaattaatatttttgagttaattttattgacaaaaacataaaattcccttatagtatatttcatataaagtttataaaattagtaggaaataaaaaactttatatatgattagctaaacagtgcaatcatcacataaagcattattttatataataattgagataaagttttaataatgtatgatttaattaggtttctatacgaaagtatgaagtggatcttagattaataaaactttaagtgtaaatttattactgcaacgtatactaaaacttgttattttctaggatgtcatttgtttaaaatcctactaaacatatatgaatattgattttttatatatgagcaataaatatttatgaaaaaagattggggagaatattgtgaaaaaaactgggatgttatgtttgctgctttctattacgctaattactggggcttttgtcggctgtggaaagcaaggaactaatggcgataatagtaagaaaccagtggagctcttgaatgtatcatatgatcctacaagagaattatacactaagtttaatgaaagtttcataaagtactggaaagaaaaaactggacaagatgtaacaatagatcaatctcatggaggatctggttcacaagcgcaggcagttatggggggattagatgctgatattgtaaccttagcattgggatatgatattgatgccataagcaaagctggtctcttgaatagtgattggcaaagtagttttaaagaaaatagtgcaccatatacttcaactattgtttttcttgttagaaaaggaaatccaaagaatataaaagattgggatgacttaacaaagaatggtgtttcaattgtaacaccaaacccaaaaacttcaggtggagctagatggaattacttagcggcctgggcttatgcatcaaaaaaatataatggtgatgaaaattctataaaagagtttatgtccaagttatattcgaatgtagttgtattagattcaggatcaagaggagcaactactagttttgttagaagaggattaggtgatgttcttatagcttgggagaatgaagctatgttatcactacaacagcttggaaaagataattatgaaatagttactccatcattaagtattttaacagagccatcagttgcagtagtagatgaagttgctgataaaagaggtactaaagatgtcgctgaaggatacttgaactacttatacactaaagaaggacaagaactagtagctcaaaactattatagaccgagggataaagacgttgctgaggaatataaagatacatttcctaaattggatcttgtaaaaatagatgattcactatttggaggatggaaaaaagctcaagagactcatttttcagatgggggaacatttgaccaaatttatattcctaaaaactgagaatattagagtataaagttaaaattgattcagtggtggatgccaaaaagaattttagttgaacttatacaatcaaggagaatcaaatctgggagattgccagttttatatctaacttagataagaggaagataaaagtggctaggtatcagagaagttttttaatatggtaattatttttttagagtgggggatgaatatgagcaagacaaaaagagttattcctggatttagactgacaatgggtttttctcttgtttacctaagccttatagttttaattcctttatcagctttagtcataaagtcagggggaatgggattagataaatttcttagtacagtattaaatgctagaacattacacggatacttggtgagttttggggctgcatttatagcagcgataataaatagcgtattcggggttatcttggcgtgggttttagttagatacgattttccatttaaaagatttatagacggaataattgatttaccatttgcactaccaacagctgttgcaggtatctcacttactaccttatattctgagaatggttggataggaaaaatactttattcatttggaataaaatcatcattttctattttaggaattgttatagccttaacatttataggaattccatttgttgtaagaacaattcagccagttcttgaagatttagacggacaatatgaagaagcggcagcaatgcttggagctagtagattaagaactttttgcaaagtaatatttccagaaatatcagcaccattattaactggatttggtttagcatttgcaagaggtgttggtgagtatggaagtgtagtttttatcgcaggaaatcttccaatgaaaacagaaattgcacctcttttaattatgtcaagattggagcaatacgactatagtggtgctacggctatagctttagttatgttaggtgcttcattcttaatattattcgttataaatggaattcaactatacaatagtaaattaaagcagatatgaggtgaatagtaagtgaaaaaaacatcaatgaatagaagtgaaaataaattcttaaaatacggtttgataggtataagcatattttttcttatactaatgcttattattccactgatatctataatttctgaagctttggctaaagggtttggtgcatatattaaagcaatttcagagggatatactcttaaagctatgaaccttacattaatatctacgttaatagcaacaatcatgaatactatatttggtatatgcattgcgtgggctataacaaaatttaaatttagagggaagaacctgctaggaactttaattgatctgccatttgcaatatcacctgttattgcaggattaatattcgtattaacatttggaaaagggagttttttagaaaatattttagttcaaaataatataaaaatagtgtttgctgtaccagggataatattagcaacaatatttgtaacctttccgtttgtagcgagagaaataatacctttaatgaacgctcagggaactgatgaagaagaagcagcagcgatgatgggagctaatggatttaatatatttagaaaaataactcttcctaatattaaatggggacttatatatggagtaatactttgtgcagcaagagcaatgggagaatttggggcagtatcagtggtatctggtcatattagaggaaagacaaatactcttccattacacattgaaattttatataacgaatatcaattctcagcagctttcgcagttgcttctatattggtaattattgcagttatggtattgatattacgtaatattgtggaatggaaaactaagaagggggtctagtatgtatgtatgtggaactaaagaatattaataaaaaattcggagattataaggcatctgacaatgttagttttagaatagagcagggaaaattgattggccttttaggcccaagtggaagtggtaagactactatacttagaatgatagcaggtcttgaaactccagatgaaggagatatcattattaatggagtcaaagtcaatgatatagaaccaggaaaaagaggaattggcttcgtatttcaaagttatgctctatttcgtcatatgacagtttatgataatgtagcgtttggtcttgtggtacaaaaagctaaaaaagattatatacatgagagagttatggaacttatagaacttattggtcttaaggggcttgaaaaaaggtatccaggtcaattgtctggtggacaaagacaacgtgtagcttttgctagagcacttgcccctaatccacagctattactactagatgagccttttgcagcaattgatgcgaaggtaagaaaagaacttagaagatggcttagagaaacaatatctaaattaggaataacaagtatctttgtaacccatgaccaagatgaagcggtagaagtagcagatgaaataataataacgaatagagggaaaattgagcagaaaggtagtccagttgagatatataagaatccaaagactcatttcgtagcgcaatttattggtgaatcgaatctaatagatgattatactaagctaaaaggatttgaagttgtaaaccctaaagaaacaaaggcaatagtacgtcctgaatttatacaaattgctaaaaatgataaggagattttgactcctcttgcagcagaaaaaggaattgtaaaaggtattgcatttagagggaataatcttgaaatagatgtacaggtagggaatcaaatattttatggatatcgtagcctggaagatgaagaattaaaaattggtgaagaagttttcgttttaatccatagagtttatgcatttgatgaaaaaagtgcaaatgttgtggaaaataagattaaaacagaagaaatgtctgtatttatttaacacggcacaatcaaaaaatatggaccttaaaaaaggagatatgctatgagtaagaacgttcaagtaaaacaattagaaactgatatattaattattggaggaggtactgctgggtgctatgcggccttaaccatacgtgaaaattctaatgcatccgtacttatacttgaaaaagctaatattaagagaagtgggtgcttagcagccggagtaaatgcaatcaatgcatacatagttaaaggaagaaagcctgaagactatgtggattacgctaaaaaagatgcagataatattgtgcgtgaagatctacttcttacaatgtcacaaggtttaaataaggtaacaaaaaagttagaggatttagggcttgttatcttaaaagatgaaaatggcgaatatgtggctagaggaaatagaaatataaaaattaacggtgaaaacattaaacctattttagcagatgcagtgcagcaactaaacgatgttactgttatgaatcaagttaatgttattgattatattgtaaaagataatcagatacttggcgcttttgcagttggtgtagaagaagaaattctatatgaaattaaagcaaaaaaagtaatatgcgcaactggtggagcagcaggtctttataaacctaacaatccaggcttttcaagacataaaatgtggtatcctcctttcaacactggtgcagggtatgctatgggaatagaagcaggggctgaaatgactacttttgaaatgagatttattgctttgagatgtaaagacacgattgcaccaacgggtacaattgctcaaggtgtaggcgcaaagcaggtaaattcaaaaggagaagtttatgaaacaaaatatggtctaactacatcagaaagagtttatggaacagtaaaggaaaatcaagaaggaagagggccttgctatttaagaacggaaggtattacttctgctcaagatgaagaattaaagaaagcatatttaaacatggctcctagtcaaactttaaaatggatagaatcaggaaaaaatccaagtgagcaaaatgtagaaattgaaggaacagaaccatacatagtaggtggacatactgctagtggatattgggttgataccaaaagagaaactacaataaaaggtctttatgcagcaggtgatgtagctggtggatgcccacaaaaatatgttacaggagcactagtagaaggtgagattgcagcaaaggcagcagttgaagcaataaataatagtgataaagatgttgttactttatcaacaactgaagaagatttacttataaagaaaaagaaatcagaagttgaaaaagtgctaaactctgaaaatcagatattcaattttgaacaacttgaagaagcaatgcagaaggtaatggatacttatgcaggcggaattggaagtagttatcagttcaatgaaaagcaacttgaacttgcaatggagaaaattgagcaaattgagaaattgagtgaaaatctttatgcagaagatatgcatgaattgatgtttgtatatgagttaaaagagagacttactctttgtaaatctgtaattgcccatttaaaagcgagaaaagaaactagatggcacagctttgcagaaaaccttgattatccagagaaaagcgatgaatggttaaaatatgttaattcgaagcttatagatggcaaacttaaaatgttatatagagatttagtgggaagaggtgaaacatatgagcatagcaattaataaaaataaatgcataggatgcaaaagatgtttagctgtgtgtccaggaagtcttataaaatcaactgaagatggcaagaaagtatatataaaatatcctaaagattgttggggatgctcttcttgcataaaagaatgccctacaggttccatttcattatatctaggagcagatatgggtggaagaggaagcaaacttacagttaaatttaaagatgatattgcagattggaagattgaagaaactgatggaacagagcattctatcgaaataaaccgtaaagattcaaatcaatattagaatcaattcacaatgcacaattatcaatgcacaattaaggaggaaaagcctataggcttttcagaaaaaatatacacatatgaaaaaagcagctatgctgcaatcaagatcatttatatgaaaaaagcagctatgctgcaaccaagatcaattatataaaaaaagcagctatgctgcaaccaagatcattcatataaaaaaaacagctatgctgcaaataaaaacacttcacttagaaaaagcccaaagcgtaataaagaacatttgaataaattacgaagtaatttattccacaattgtgcattgcgaactgtgaattgtgaattgaaaagtatatttaaaaatttaaattagcaaatagggggactaatatatgagcgaattatcacatcttgataaattagaagcagaagcaatttatattattagagaagtagcagcagaatgtgaaaagccagtaatgctatattcaattggtaaagacagttcagttatgttacatcttgcaatgaaagcattttatcctgaaaagccaccatttcctttcatgcatatagatacaacatggaagtttaaagaaatgatcgaatttcgtgataagacagcagaaaaattaggaattgagatgattgtccattcaaatgaagaaggtataaagcaagggattaatccttttgatcacggatcagcatatactgatatcatgaagacacaagctttaaaacaaggattaagtaaatatggatttacagcagcctttggtggaggacgtcgtgatgaagaaaaatctcgtgcaaaggaaagaattttctcttttagaaatgaagcgcaagcatgggatcctaaaaatcaaagaccagaaatgtggaagctttataacactaaaataaataaaggtgaaagtatgagagtttttccaatttcaaattggactgaaaatgatatatggcaatatataaagcgtgaaaatattgatatagttcctttatattttgcaaaagaaagaccatgcattgaacgtgatggcaatataattatggtagatgacgatagattaaaactattaccaggtgagaaagttgaacataagaaaataagattcagaacacttggatgttatccattaacaggtggttttgaatcagatgcagttactttggatgctattattgaggaaacccttagtgccgtatcatctgaaagaacaactagagttattgatagtgaagcagcaggtagtatggaaagaagaaagagagaggggtatttctaagatgaagagcttattaaagtttataacatgtggtagtgtagatgacggaaaatctactcttattggacatattttatatgattcaaagcttttatatgcagaccaagaaaaagctttagaattagatagcaaagttggaagtagaggcggagcaatagactattctctattattagatggtttaatggcggaacgtgagcaaggaattacaatagacgttgcatatcgttattttacaactgataatagaagttttatagtagcagatactccaggacatgaagaatatactagaaacatggcagtaggtgcatcctttgcagagcttgctattatattaatagatgcaaagcaaggggtacttgttcaaacaagaagacatgcaagaatttgttccttaatgggtgtaaagaattttgtatttgcagttaataagattgatttagtaggctacagtcaagaaagatttctagaaattgaagagcaaattaaagaattagtaaatgaactttcattagaaaatgttcatataattcctgtatcagctacggaaggggataacgttactaagaagtcagaaaatactccatggtatgcaggggaagcacttttaccatatctagaaaatgtagagattgatagtaaatccgaagaaggtttctatatgcctgttcaaagagtatgtagaccaaatcatacttttagagggttccaaggggaaattgaagctggaagcatttctgtaggagatgaaattacaacacttcctagtaatgaaaaagcattagtaaaaagtattcatattaccgataaggaatcgcaaagtgctggaaaaggtcaatctgttacaatacagcttaataaagaagttgatgtatcaagaggctgtgtacttacaaaagaaactgatattactacaagtaagttaattagtgcaaagattctttggatggatgattcggaattaacggctggtaaagagtattttgtaaaagtaggtactaagatgctgactggtgttgttacagatgtaaaatataaaattgatgtcaacacaggagagcatttaccaactggttatttaacaaaaaatgaaatagcggcatgtgatattctattatctgaaaagatagttgttgataagtttgatgcacataaaacattaggagaacttattttaatagatcgtgttactaatatgacatcagcttgtggtgttatagaagatgttcataataatgatactaaaaatgcaaaatttgcttttgagtataatgaattaaaagcaagaggagatatttttgaagaattctattatgatacagaaactttatctatattcaaatataaaccagaagaaaagacttatactgtaggcgatgagcttccaatagaaggtgatagctacaaatatccagataactttgatttactagttcttcgtgactcaatagtaattgaaatacgtgataagaaaattacagatattaaatctattgtcgattataaatatcaagaagttccagttattaatggcagaggatttgaagttaaggtaaattctaatgaagaagttgtaaaattcttgaatgaatataaagaagctaacgagaaaactctaggagatttcttaaatagatgggttagatttgaaacttatagaagagtagtttttcatagtactaaatagaaaatgtataaaggtgttgtcttaaatacagaatataaaaaataaatcaaagaagccttaaaaatgattggtaaattatttttgaggcttcttttactaacgtttattattaataaatgcaattactagattttaaattcgaagttatataatgtattattatgttataatataaggaaaaatatactatatttatatttgttttattgaaaaaggaattatttgatgataaagtttaatgtaggtagataggggtgattaattttatgaaacataaaatattattgtttaattgtaaacctggcatgattttggctgaggatataatatgtaatggtttaaaattagcgtctaagaatacaatactcaattcatatataatagataaattgattagtcttggagaatatagtgctcatatctatgtttcgggagaaaacaatagcttgggcaaaagtaatatggataaaattaaagaatttgaagaggattatgatgcaagtatattcaatattaaagaattaataagaggattgattacaacaaataaaatgaattctgagagtatttctaaaatatctaaatcgataataaagtatttagatgagcctaacatcataattaagtgtttagttgcgttaaacaaagcagatgagtatacttatacgcattgtataaatgtagcaatatattcaatgcttatagcaaaatggatgaatttatcttcaggcacagttaaagaaattattgaatcaggacttcttcatgatatcggcaagattaaaatagataatgaaatattgaacaagccaggtcagctaacaagagaagaatttgatgaaattaagaaacatactattttaggatatgatataataaatgattatgattattttagtagaagtataaaagatgcaatacttatgcaccatgaaagaattgatggatctggatatccgtttggaaagttaggaatagatattacattaaacgcaaaaattgttgcagcagcagatacatttgatgcaatgatatcaaatagagtatacaagaaaggcgtaactccacttaaaatatttcaaatgtttttgactgaaggagtaaaattgtatgatacttcagttatttttacactcttagaaaatataagcccatattatataggaatgaaggcaaggcttgaggatggtaggataggtgaaattatgtatatacctccaaatgatatactaagtcctattgtaaaaattaatgatgaacttattgatttttcaagaagaaaagacttggatataagtgatatatttgtataacagttagtaatataggaatgcggaaatttaaaacttaaaaaaatgctgtgtgtatatgtcgaatcgtaattccatttttggaaataatatagataataaaattagaatattagtatatctagatgaaaacttttattaatgcaaaaaaagcaaatataatataagttgacaattatatagagtatttttcgccaaacatagactcgaagtagattttaagctactttgagtctatttttttgtataaatttatagaaagggcaaaataaaattttaatataaaaagattatttgattatataatttgataaaaattattagatgataataccaattaatgcaatat

SEQ ID NO: 120 - DNA, 15636 bp, Clostridium beijerinckii
gcgctagttaatgtaccttcataaaaatatgaaatatactcataataattttcatcaatataatttctttttattaagaatttaagtaaattttccttttcaatatcatcaattaaaatttcattataatcacatttttctaataacttacttaatggcaatgattgtacaattctcttttcttcatttaaattttttaattctctttttaaatcttctataatattaacagttatatttttttcttttagctttataactttttctctttccaaataagtaaaaccattgttttgactgtgtataatgtctagatttatttttgtccatatgcttccattataatatcgagaattattccttgaatctatcatatagtgaaacgcattttcatcttcaataagtctattaaaatcatatctgctattattaatatcaatttgagaaatactcgataattttacaatctctgatatatagatgcttcttaattcccttaaattattagcacattcatgctctgcaacttttatatctttctcaatctcaacaatttcttcatttatttttttcaatctgtttttaactaattcattttttttattatagaaaatgtcataaaccataccctcatcattttgtagcttagcaaaatctacaggataaacatttttatatactataatagctaataatttaacataatctaattcagatttttcatcttgtgtatcatgtattactccacttatatcttcatcatttttatcttcttttaaattttctttatatattacaaattcattatagatattatttaatactctcatatcatttattaaaattgtaatttcgcttataaatttttcatttagcccatcgaattgattagcattcttaaattttctaatcaacaaatcacatgcattagaggaattagccacttgaacaaccggaataataaaatcaaaaaattttgttctatttttgtaacttattttatcatctttgtatattattttatcttccttctcttcctcactacaaaacatatcgtcttttaatgcataaataaaaactactcttttatttacttgtttagaatcattaattaatgaattcaattcccttaactttgaaaatatatcgatattattgaatctatctaaatcttcaaatataacaatatcatacttagtagcttcaaaataatatagtatctcatcaatgtatttattaaatgccgattcgtctttttcatcaatttccatttcaccagcattagtttttatttttttgattttaatatgttttttaacatatattgttatcttgttacttataaataaaaatgcgcaactgaaggctaccataagaatagcaagtatataattattgatttgaaggttactttttaataattccattctttgtaatattacttttaacaaatctggcttgtaaaataatcctcctagcataactacaatcattagtggaatcatatttataattatcgaactataattaacactattaatacgcttaaatcttgaatatggaatcgtagtattcttttctctatagaacatttgctttaatattgctttctcaatatttatgttttcatttgaaagtatgttttcatctttatcttctttaaaattggctaatgaaatatttaaatatttatattcattatgctctcttttatatgtatttaatatagtgcttttacctgcaccgtatacccctgttaatgctatatttcttattttgttattttgaacagcccaatcaatgctttcacagtattgcttattttttactacatcgattttaggcattaaatcttcaaattcatatttattttctttttcaatgtcttttgttaatgaaatataaagtttattcaaatgctgtataattctaataattgttatatttatcacatttctaattctaattttaacatcttccatatatctgcctaaatactctataattaacacctcttatcaataaacaaattatttttattatcttcttcattattatcacatttttctacatcattgtaaatataaccctgtatagttataatataattacaactatttataaggaagtgattttatgtcatattcaactggtgaaaaacctggcataggtacatatgtatgtactaattgtggacaaacagtggtactaaatgataatactgatactctaccaccatgcccaaagtgtgataaaacatcatatactaaagcttaatttaaaatagactgagcaatgctcagtctattttatttatatatctaatatattaagaatctccttgagttgctttaattcatcaatacttaaagtaatccccttccccatcttctcatgttcaggagcccaatcccttaaatcatatttcgcttcttttccattccaacttattaaatttaattctttggtccatccttttgatgactctgatatttttcctagttctttttctatttcaaatttaatatcggccactattccttatctcctttacatgcaaaatcgtatattacaaatctaatataattaacattatattctaggttgccctgaataaacatttccattagtattgtaagtaacattaaacaccatatctgataaccactttttaaatgagtcattatcattaaactgtttaaatatttctatattatctgacatcagatttattacggctttatttaatgctttttgactttcaattctagcattttgtttatccgagtttttcattgcattttgatatcctttatcttttgctacaatttcaggtatacttgcaatatgctttttaacttgatcttcatctttccaaggaatgtttccaaataaatcatgaaaattagatagtatattacttaataaatcaagttcaggttcacttttcccaccagctattgaagttggtactggatctatttcatattctccttgatcttctaatataatagacatagttgcttgaacttctgctctataactatctaaatctatcgattctagtattcccttggataaatcatcttcctttggagatggtaatttaggtataagcatatttaaaaatatagacaacttttcccattccacatttccataaggcagaattgaagctaaaaatccataggttcttacaaatgcttttgccttgcttttaaagtcaacttgtccatcttcatctaactcttctttataattttgagcacatatatcaaggataggatcaagtttatctctttctgctccgtttaaataaagctctactaatgtttctacatgataatcagtaaatatatgatgatttttaatatcactttctaaatcattaagtttatctggatctgtttcatctgataaaattgttgtttcataatactttgaaaaagcttctttaattgtatccacatcattagcaaagtctaaaataaatgtatcatgtttttgtggatgagctctatttaatcttgataaggtttgtacagctttgatatcagttaatactttgtctacatacattgtgtggagaagtggttcatcataacctgtttgaaatttattagctacaactaaaattctgtaaggatcttttttcaacttcttttcaatctcattacttggaaatccattaatagcactttcagttaacttatctcctccaaattcatattcccctgagaaagcaataattgctttatatggacttttccttctttttaggtattctgttatagaataataatattcaatagctctttcaatactgcttgtaaccaccatagcacgagcttttccaccaatttttccttttgcaatcacttgttcatggaaatgatctatcataatttcagattttatctcaattgctgtttcatttgactcaacatactttcttaactttttttgtgcttttttcttatcaaatagagggtcatcctctactatttttgcaattttataataactatttattggagtataacttttaagtacatctagaataaagccttcctgcattgcctgcttcatggtatacacatgaaatggcctatgttttattttaccttctgacggatatggaactccaaacatctctaaagttttgtgtttaggagttgctgtaaatgcaaaataacttgcattagtaagcatttttcgtccttccattattttaagaattatatcttcagtactttcttcttcatctttattataattttcagataaagccatattcatcttagctgacatatctccactttgacttgaatgtgcttcatcaattataattgcaaaattgttttttctatgttcatttcctatttcattaaatatatagccaaatttatgcacagtagtaataattattttcttctcatgctccaaaagtgtttttaaatctccagatctgtcagcatgccctacagtagttgcaacctgcataaagctctttattgtatttttaatttgcttatccaaatttactctatcagttacaacaattatagaatcaaacatgctctttctatctttttcgatagccactaattgatgtgcaagccaagctatagagtttgatttaccactacctgcgctatgttgaattaaatatttttgtcctacaccactttcttttacatgactcaaaattgatttaactgcagctaattgatgaaaccttggaaatacctgttttctatttttctttttagtttcttcatctacctcaacaactatttgagcatagttttctataatatttgataattcattcttcgttaaaatctgcttccataaataatcagtttttattccattaggatttggaggatttccagctccatcattatatcccttattaaaaggtaaaaaccaagatttcttgccatctaacttagtgcacatttttatttcgtcatcatcaactgcaaaatgtaccatgcatctgccaaagttaaataacaattctctaggatcacgatctgttttatattgataaacagcatcttcaacattttgttttgtaagtctatttttaagttcacaagttataataggtaatccattaataaatatagcaaaatctaatgcaagcctagtattatcctttgaatacataagctgcctagttacactaaaaatatttctatcataaagttcttttgccttaggattttgctcagatggaatgccatagtataaatctaaagtaactggatatacttttaggccatttctaagcacatcaataattccattctttgtaatctcaccctgtaatctattcaaaaatttcactttatttatatcacttttaaatacacctaatatctcaagcttttctggctgtgtatcttttaaaaatctaaatagtctagtttcatcaatagcatactctttgttataatcactattttcaccttgttcatatccattattatgagccatataatctacaataagactttccaaacctacttccttagtattagataccacttttaccacctcccaatttttatttattccaattctcttgattccaaactagttctagctctttctattgccttatgtagtttttcttggaataattccttaggtggcaactgtgttaaatattgaccaacatgtattccactcttatcaacctcaagtaactctatttcttcgtcatttttacttgcacataatattatagcaataggcggctcttcaccctcattcgtctcattcttttgaagccatcttagatacaattctacttgacctttatgctctggtaaaaattctcctaatttcagctctattaaaacaagtcgtcttaattttctatgataaaataataaatcaatataataatccttatttccaacagttattcgcacctgtctaccaagaaatgcaaagtctcttcccatctcaagaatgaatttctctaaatgtgctaatattgcattttcaatatccttttctgaataagtatcctgtaattgtaaaaaatctaatacataaggatctctaaaaaataaatctgttgtcattttgtttttatcatttagctgctttaagtcattcctaattgttaattctggtttcttagatatagcagttctttcataaagcatagaatttattctatcagttagagttcttacactccaatgctcattaatacacatagtagtgtaaaagtctctttttaagtcatcatcaatataaaataattttacaaagtgagaccaagacaattttgcagacagtgtctgcaaaatctactcatcatgaaaagtttcaaaaaacttaaccatattaaataaatttctttgactatatccttttccatattccttagttaaatctttacttaaatcgctaataactgattttccatactcagccttttcactttgcagtatttccgttttaataattttacctatattccaatataaaattaccatttcagaatttactgccgtaactacattcctcttactattatcaattgccttaactatttctttatatagaaaatttatattttcattatttataaggttactcatttaattatcacttcctttgctatgccatattttttatctaaattgcttgctataattattcctcttcgatatctaaagtttcatcattttctaattcttcatcatattctatttcataatccttggtatcttcgtctatagcttcatcaattttaatattgcgtacatcaacttttcctgttacaacatctgaaataagagatgtacgatattctgtaataagttcaatttctttttgagttcttgatatggcttcatcaatattaataattgcagattttattatttttattatctcatgttgctcatttattggtggaacaaaaataacaacatctctaatagattgatatgaaagtccatatctagtcacaccttttgctttaactttatattgtactgacacatactgtgatagaaatgcactataaagaaattcgctaataatattattagattttttccttatcaaggctaagtgatacgcgcaaacaacattttctaacttgttaggtacatacgctggaaccgctatatcatcccaagattctgaatcttttgtaatgattatgtccccactccttaatgataaattacgtatttcatcctcactagcggttgctatcataaaatctatattattggttatatagtcattcttataaacatcaacataattgcaaagaaagacttttttctgattatcatacgattttttatctaatccacttagcgtaactttagcaatctgggataaattaagtatttcccaatgctcaggaatatctcctaaccactcaacaccagatgatttcatttttacattaggattaattcctttagttactgctccatttataattgcctgcttttgctcctttaatgtagcaataagttttttctttgcttttataaacttatttatcttagctagctgaaaatctaaatattttactatttggttttgctcctctattggtggaacaattgatgatattcttttaaatctatcaaaatacaatctatttctttcatacataattccatatgaatttttattaaattctgctttatataaaggagttctgaataaatagtgataataccaagaatttatctttattttaggtctgcatactgcataagctggactaattatcccctcatacttagatgctccaattccacccataaaagcattcattaaattatatccaatatctccaacacaaattttcttgtaagcttgattctcctcagacattctaacttttcttccagtagatctttgtctcacaattcctttatcacacataatagataaaagctctaattttggatgatttgtatcaacaatttctctaaataaaatagaatttctccttacatgccaatgagaaggtatctttccaatccattctactttgctatctttatactcatcataaggtttaagtccattattcatttctcttaacctcctatgatttcattcagaagtccatctgtttctgcttctaacgctttaatatctgctgttatttcttcaagtgttcttagcttaactggcttataaaaatatttcgtaaagctaatttcatatcctatttgtgttttactttcatcaatccatgcatcaggtgcaaaggataatacttcatctttgaagaattgttctatacctccatcatgtagtaatggtatttgttctgtatctcttaaattagcatcagcctcatactcaacaatacattcctttccatcaaccactgagctaaacaaaccatataaaggatttgcttctgattttccctttttgtgaattttctttattactttttctgcattttcatcaactgttgcaagattgttttttattaaattcaatcttttagtaggaagctttatgcttaaattatttgctactgtagttaattctttaacaaataaattataatcatttagtttatcaaaatttaatttttctgctacgtctaaaataacactcataacctctgtatctttttgttctgcacaaaccttggcaaagatttcaatattttctcttgataaatctacacttaaacgtaatggtctttctactgttatcttataatatccaaattctttattatcaaatatttttgattgttcattttcttcaaatttaagaagcatatctgaaatttcttttctaatttcaggcgttaattcacaattcttatttcctaaattctttctaagtggactttttaaagctgttgcatcaataagttgtacttttccaatgcggtttttagcttttctatttgtaacaatccaaatataagttgcaatacctgtgttataaaacatattttcaggtaatgcaataatagcttcaagccaatcattttctattatatatcttcttaaattactttccccttgacctgcatcacctgtaaataatgatgatccattatgaacttcaacaatacggctgccaagttctgtattgtgtttcatcttacttattttatttgctaagaacagcatttgaccatcacttgaacgaggaagtattttaaagtctgtttctccattatgtgatactacaaaacgtgtatcgcatatatctcctttaccacctaatctatctaaatctgttttccaacttttcccgtaaggaggatttgaaagcataaaatcaaaattcgttgtagggaatccatcattcgaaagagtagagccataagctatattttcagcttgcaatccatcaccttttaaaagcatatctgctttagttattgcataagtttctggatttatctcttgaccatataaatttatagatatttcgttattatgatcttttgcaagttcttgcaatctttcttctgctatagtaagcattccaccagtaccgcatgcaccatcataaactaaataagttgtatctgtaattttatctgcaactggtaaaaatacaatatcagccataagttcaacaacgtcacgcggagtaaaatgttctcctgcctcttcattgttttcttcattaaacttacgaattaattcttcaaaaattgtacccattgtatgattatcaagtgctggaagctttacttctcctttatcatccagtaccggttcaacacttaaattaatagttggacttacaaacttctcaatgactgcgcctaagatatctgcatcaatcattgtatctatttgatttctaaacttaaacttttcaagtatttcttgaacattaggtgaaaatccatctaaatatgcaataaaatctatctttaactgttgcttcttagctcttgattttaaatccttaagtgtaaaggctgatgcattgcaaaatgcctgaccagaaacattacataaagctgcagtttgatttacaactccagcagcatctagattcttcttcatttctaaaacatcttctttggttgcttcaaggacagcatccaatcttctaattactgtcattggtaatattacgtctctatattttccccttacgtatacatcacgtaagcaatcatctgcaattccccatataaaattaactatttgattataaatttggttatccatttatgttcctccaatatgtaaaataacaatatgttatttaaaaatcacttcattagttaaatgttttattttaattatactatctatcattttattttcccataaattacatcaaaagtctctctaaaatgtataaaatatgtacattaattaatttactgtataaagcatttaatattttccaaaaacaaaagatagtaaacatgaacttactcacatttactaccttattaatttgcttatattgcatatcttatacagttgtaattttattcttaataatattagtataattataaatcaaatattcttctacttaatccatgctccactctcatcgaccttaaaaccatcaggcgtaacacaatcacaatacatcttcccatcttcatcaaaagcataacacttcccattaatccacttccacaaaggcttatccttacttcctctaaccatcatgcaattttcatctaaataataccagacattattgttttcatcatgataccaagaattctgcaacgcatatcctctactatcaaagatataccactccccctcaatctccttccaaccattatctgaggtatagtaatatttatttattggatcaggtgaataccaccatccaacatcattcctattccatccaagtttccattctccattgctagaaccatcatctccaactaagccactaacaatagctcttgcaattacttctggatcatacacattagcatcatcactatcagcaaacaaacattcaactaaaattgcaggcataatagtttcattaagaacaattaagtttcttgtttttactcccctattaggtaaattcagagcacttgataattcattgcatactttatcagcatattgatttgctacttctgattttccaaatactaatacttctggaccagttcctccccctgcattaatatgaatctcagcatacaactcaacatttgttgtcttagctatctcattagcttcacttgccctttcatagcaatcctgacagctatagctattactcttatctattctaagcaaattaactccataacctctttgctgtaaatactctgcaactaaagctccaatctgacgagtgcacttactctcatcaagcctatcaacaactccacatccaacattcccactagcagtatgacccactgctattataaaattactcattttacatctctccctataattcttaattttttaattactcatatacgttatatggtttttaaccatatatactatatgtagaggtaaatttaatgacaaacacaataaattacataaacctcttcgagcaatcttttaaagaaatcttgtaagaattttatcaaaaactcttaactgaattaaaggaggtttacatggattttaattatattgaatctttagttatcaaatgcaagaataacgatgaaacagcaaaagaaaaattagctgctgaatttaaacctttaatttataacatttctaaaagaacctttattgatggctataacatgtatgatatacagcaagagtgctttgaatcacttttcaagtctgtttcaatgtacaatataaaaaagcatagattcgttgcttatgctactaactccattaaaaataatatcaaagatcttataaagagaattaaatctagaagctccactgaaggtaatgaagcattaagcttacattataattttgaaaatgatcttccttcagaagaaatttccactgaagtatcattatgcgaaatgtgtgattatgaagatttaagactggctttagatgatttaacccgagaggaaaaagaatttatagattttgtattctttaaaaattatacagttttagattactcttatttaaagaatatatgctattctactgctatcctaaaaaagaacactattctaaagaaaatactaaataatatgtctcattattataaaagcatcaaagcataaaaactccaaggctcacttggagtttttatttttatacaattatattaatctatatccacttattcaaaattgaaattattcacaacctctgtagttttctccacataattatcaacaacttgatctattccatcacaaatatattttagagaacatccttcacatttattaagtattccttccgtaattaaagaacattgaagttcatcattaaaggtagaatttctaattgctaaagctatttgctttttatcaaaaacctctccttcttccgaattaagtttaatttcatctctaatcatttttaaaacacactccaataatttatttacagctttaaaatttagtagctgctattattgatatatgttttatactgtaacataacattaaaatcatgattaaacttgcatatctaatctcctaaccggcattttacaagcaaattctaatattcttaagttcttttattcttaaattctaaaaaatatatattcctaaattctttagaattttagaatttctaataaataaccatatatcttttataaggatacataaaaatactgctaaggagggtatataatttatggctagaagaaaaacatcaaaggttcctaaaaatgattttgaatatgatgaaggtgaagtatatggatttactagcgaaactcctatagctggtgactgcatttcttcattctcttttgatgatgactctaatattaatattattcaaaatagctctgatagtaaatctaataatactgttattcaagaagatcctaaaaccaatactcaagctaatactgcttctactattaacagcaattttgaaaataatataaccaactccttagaaataaaaaatactttaagctctactaaagaactgtttgataatagaagaactccactacctaatggtgccactcctgccattgatggtgagactccaaatattaaaagaagctacactcttagaagttctaccataagaaaaataaatgaattaaagagcatccatccagatatcaatgtatgtgtcagtactatagttgatattgctataaattattatcataaccatattgtaaatgaagatggcactcaataatttaatttatctattttaatttcacataattatttatttcctaaatatgaactaatatattttatttcatatatccattataggaggtgatagatttatggaagtaaatgaattaattaaccttattgttaataatggttttccagtggcagtgtctgcatatttgctaatacgcttagagaagcaaattgttagcttagcaagttcaattaataagttaaataccataatatcagctaaacttggtgttgctatcgatacagataattctactgatgattctcataaagtggcatgagtaaaaaggcgataaacattgattattagtgtttatcgcctttaaatcttgctcatattatgagagcaaaacgaaatagttcaatatgaatttatattataaaagcatacgcaagttaagaatactatgtaaaaagttaattactttgatataaactcatctttgaaaatttaatactctctttcacaataatttactattatattttataagaatgtaatgaattagtttgatggctttttacataaataatgcaaaaatagacttgctactgctaacttatattttttctcgcaggaaacagaattagtatcattcataaaactttgcaaatctcgtagctcaagtcctgaatatatagctaatgtttcatagctaattccaaactcagctattagcacatctattacccctttaactcgatcatcttcatttaccatccctatcccttcagatagcatgaaaatcatgttgcataaatgcgaagggttcggaatattggaatttttcaaactctcttcattattctcaccagaatttacgatattggtaaaaaaatcatataatttattttttccatccatataatctttcaaccaaacataatctactcctatcatcttactcaaagatttcagttcaattttatatttttcaagcaaattttctatatcttttcttataacatcttcagtttgattgaagtttgtagaaacgatagtcttaattgaattaatttccattatagcctccttttataatatttatagtttattcttattttgcattttatttgatttgtgcactaaaaagtcgcaaattcaatcatcttgaataatgcaattttacaatttattatttgattttaataatttatgatttaagacaaaatatacatttgctctttataacattagctacctccactattttttaggtcaacataccataatcctaaatcacttttctctacagctataaaatcaggtccaattcctggattttcacagtaatatttacctttccatggtgtttcattactcatatatatatctgtttttaacgcctttactaaatatccgttaaaaaacaagtgtgttcttattgaattttcaggtgttgaatggcaaaataaataacttcctgcaaacgccaacactattattacaaatataatatacttctttagtcctttcacttgctgctctcccctcctttgtcaaaattcccactctattaatgaacaataaatttactgttatgacacaatttaagaatattattcttcgacataatataaaaatttctattagaagtaaattttacaggtaattcacaggattatctaaaatttcttgaacgatattaaaatattgtccaatatgtattccatcaaccaaggcatgatgtacctgtacagagatcggcaacttaatcctaccattctcttcaaagtatttaccccatgatattcttggtatgctatcaacaggattcatctgaattgggtgagttatattagtaaatgaaacccatggaatactggtaatgtataataggtcatcacgccttggttcatcttctataataacgttgttttttaccttctcaatttcctttaatgtattatttttgaattccttaaatccctctataaaattagatgtacagaaactaaatatttccccttctgtcatcacagtaaaagaagggcttacagttttatgttcaatcaccttatcttctcttattctaaatctaaattcttttatattgtttgctgcttttgtggaaacatataacattgatacaaaaaacggaaaatcattttctttaatatagctataaaactttgtaatatcaaggtttccacaaatattaaaatgcgggtaatcaactttcttaaaataattatagtggtcttttctcttccagttttctatatctataaatttcattaggatatcactctccattaaaattttattatctatattgcac

SEQ ID NO: 121 - DNA, 15477 bp, Clostridium beijerinckii
atattgtgtagaataaagttgtaataattctttttataaacaatatttttaaaattaaataacacaagggggtaattatgatgaatttattttcttcaacttcttcttcatcaaatggtctagagagggagaggctaaaacttatattggtacatgataaaactgatatatctagtgaggttttagattctatgagagaggaaatactagaggtaattgatatatatataaaagcagaaaattcatgcaaaaagatgatattaacacaagatactgtaaatatagataattattcaatattgattgctagtatacctatgaaataagaaatagaatatataatgcatatgataatattacagatataaaaatcttattaaaaagaagatatactggagttttgcacgtactgcgaacagatagtaatttatatgttgcatcgttcctaattcaagacttgagcaataattaaattgatattgtataagtgtaagtgattactttactataagcaagtagataaacacttacacttgttttttttatagcatgttggaagtgacagcaaagtggtatataatgatgaaaaagcttatttaatgttttaaattgaaagggaggaataagaatgtcttatttattcgtagagtatccaaaatgtacaacttgcaaacgagcaaaaaagtggctcgatgaacatcaagttgaatatgaggatagacatatagttgataacaatcctaaaatagaagaacttcaagaatggataaagaaaagtggcttgccaattaaaaagttttttaacacaagtggaactgtatataaagagatgaatttgagtcaaaagcttaaagaactttcagaagaagaacaagtaaagcttttatcaacaaacggaatgttggttaagcgtcctattgtagttggagatgactttgtacttgttggttttagagatgagagtttatgggaagagtcacttttgaaaggctagattagtgattaagtgataataagaaagagatatttgaatttaaatatctctttctttatttttgcggaaattatcaaagataataacttatagagattgaagagtaatttattatatgctctataattatgcaagctaatatgtagtatgttaaaatacatcaataaaaatgattaaatttatcactaaaattaatatttaaaatgtgctattctatatatcataaagcaaaaggcaaaattttcataaagcgcataataaaatttattgattaatgccaaaatagatataattaatattttaatagatatatgtaagcgcatttataaaattgctatattggggagtgatagggatggaaaattttgaaaaatataaaagaatgtattttatgccaccaaaagtgacatacgattgggtgaaaaaagattatatagataaagcgcctagatggtgtagtgttgatttacgtgatggaaatcaatcattaattgaacctatgagtttagaagaaaagttagaattttttaatatgttagtgaaaataggttttaaagaaattgaagtagggtttccagctgcttctgaaactgaatatcaatttataaggacattaattgagaaaaatatgattcctaatgatgtctcaattcaggttttaactcaagctagagaacatatcattagaaagacttttcaggcggttaaaggggctccgcatgcagtaattcatttatataattcaacttcagttgcacaaagggaacaggtttttggtaaatctaaggatgaaattaagcagcttgctgtaaacggggcagaacttctaaaagaaatagcaaaagaagaaaaaggaaactattcatttcaatatagtccagaaagttttccgggaacagaagtagattatgcggtagaagtatgtaatgcagtattggatgtttggaagccgacaaaagaagagaaggcaatcattaatattcctacaacagttgaaaatgcaatgcctcatgtatttgcttgccaagttgaatatattcacaaaaacttaaagtatagggaggctgtaactttatgcttacatccacataatgatagaggaagtggagtgagtgatgcagagtttggtatacttgcaggtgcagatagaatagaaggaactctatttggtaatggcgagagaacaggaaatttagatattgttacagttgctatgaatctttattctcatggtgtagatcctaatttgaattttagaaatatgcctgaaatagttgaaaattatgaaagattaacaaatatgcaagtaggtatgcgccaaccatacgctggtgaattagtgtttactgccttttcgggttctcatcaggatgcaatttcaaagggaataaagtggcgtgaaaataaagagtgtgagtattgggaagttccatatttacctattgatccaatggatgttgggcgccaatatgattcagatgttatccgcattaacagtcaatcaggtaaaggtggagtggcttatatattacaaaagaatttcggaatatcacttccaaaacagatgcaggaagcatttgggtatacagtaaaggatgtatcagataaggctcatagagaattaacaccagaaggaatttataaaattttagaagagaagtttattcgtaactcccatgtatttcaaattccagaatgtcatttcatacaaggagaggagatggcagccgatactacaatttgtcatggagggaaaatacaatgtataacagcgcatggaaacggaagattagatgcagttagcaatgcaattaaacagtattttgatattgattatgacttagatgtgtatgaagaacattcattaacaagagggtcatcatcgaaagctgttacttatgtgggaatcaaatgccataataagctttattggggagtaggaatagaaaatgatattattaattcatcaattgcagctttagcagtagcagttaatcaattagaagagattaagaatatgaaaagatcagatggtagaatgacagaggtattaaattatattcaatcaaactataagacggtcacattagaaaagctttcagaaactttttacttatctaagccttacttatccaaatatattaaagaaagtacaaatagtacttttgtggatatagtaaaacaaattagaatggataaagctaagagcttacttaaaggaagtggaatgacagtagaaaatattgcagagcaagttggttatgaaaatgtagagcattttattagattgtttaagaaagcatatggaataactccggtagaatttagaaataatatacctaagcgaatggaacaataaaataataaatttgtctttttgtaaaaaagatttgatcaaaaaatatagactaatatgtcatactatggtatattatatacataacaaatgatttgaaaaaactaaagatttaaataaactaaagatatttcgaaaagaggtgactatagatatggttatctcttttcttatttataaaatgagaggcaaaataattataaaacttagataaattcttattttagcactataaatatattaaaagcatttgtcgaaaaaaacctgataatcaatatcaaaaaatatagattattctttaatattgtgttaatataaatgtatacaaaagatatccaaaccccactcttaatctcccctaaattttatataagatacagccataatttggctgtatctttttattctttaagaaattataatgcaattaaatctgtggataacattatagtagtatattttactggggttaattactataaaggaataaaaaaataaatcatattcgcctgcataaaatgttcttatatgcagcatagctgctatttctgatgtgcagatttttctcacatgcgttcgaaaagacagatgcgtgaaaaaaatctacacatatgaaaagagtgcgaagcacaatacggaacttaaatgaaaagagtgcgaagcacaatacggaacttaaccacagtcgcctgcgattttttttgcgtattcagttaagagatatgtcaataaaccataggttacctaatcaattaaaaggcgactttacaacaattagatgatgtttacaatatatgctataatttagcctagtagtggatataaatttaaggatgtcttttaaattattatttagatgcttacactaggaggaaagaatatggagattataaaatcaatattatattttatattggctggaatatttgaaattggaggtggatatcttatatggatatggttacgcgatggaaaaagctatttatatggagttataggagcggtcatattaattttatatggaataattcctactttacagccttcaaattctaattttggtaaggtatatgcagcatatggaggaatatttattgtaatgtcaattttatggggatggaaaattgataatatagtacctgataagtttgatttaattggtggatgtatagctctagtaggtgttattgtaattatgtatgcaccaagaggatagtagagtgtgttatgataaaaattcgtatataaaaatcaagtgtgaagagtttgaaaaagctttaaaaacggaaatactttaagaaaaatgtaatgggtgagtattactaatatttgaattaatataaaattatagaagggaaatataaacttttatataattatctatattaaggggatgagttaatgaatcaaaatgtagatgtaatattagaaataataaaaaatatgccatgtgaaaatatcgaaggagttaatgttcctaaatctttgggatatgagcagataggaatgagtattgatgaatttgatgaagcaatcaagtacatacaagataatgatttgctgaggaaaatagttcctatatttaaagataataagatagtactaataaagataatgtaaaatcatactggatttttagaaaggcggctaatatgactagtaaagaaatagaatttgttgatttaactaaccaacagtatgaagctttgattaaaatgcaaatggaatcatataaaaaaatattggatttttgcagagaaaatataagtgattcagagaaagttgaaattatagataagaacttattaaaaatagatgaaaaaataataacaaaattagaggaaatgagagtctataataaaatatttatggaaacagttaagtaaggtttaatatttttagaggaatttctccttttttgtataattattattatggaaagaggtgaggatatggaatttaatcagaagtcatggattgaaaactatgtacatagcttatgcccgaaaaaaattagtaaagaaaatgtagataaagagataaatagcataataactttaatgaatgagttatttagtagtagaaatgcagacaagtatgttgaatttgtcccagatgaaaatgctataatattcccaggtagaaaagcaaatatttttataagatacagtgtagatggaaatggtaatgaagtgaaaatatcaaaacataaaaatcgtgaattaagcagtagtatagaaaaagcaatattaataagttgcaaaggtgaagaatatgtagtaaaagatgaaccttcgataacaatggacgaaatgtcatttgatggtttaaaagattctattaattatgcattaagcaaaatattaaactaaacatctgtgtaagagaaccctggatagggttcttttgttatatacttttattttttagtaaaattttaagaaaacatttttaactgacaaaaaactgacaaaatttaatgataatatatatattagaaagtgtaaatgttgtcaataatgtattataggcaatataaaaaatttttatattgcgtgataatgtttacaaaaagtcataaagttttaattatttttgtataaaaatcacaagaatttaatattatcatatatttaaaagaggtgagaacaacatggggaatataattaaaattaatatgtacgctgaaatgaacaaaaaaaagaatgttaagctagatttaaaaacagtagaagaagtcattttagaatataataaatggctaaagaaaaacaacagagaggataaaatagagacttatgaaaagtttttacaagtataattatctttaaaggtagattgagtgataacgcttaatttacctttttttatttttatgtagaaaaatagataagcctactataatctatacttatgcgtatacatcaccgaaatcataaatattttgattccgaaaagctatgaaaatatcgctgaaggttctaagcagcaggttgtatccactttagcatgctccaactttcctagggaagctcgactcattacattcgctgaggaagttcgagaacccaaaataagattttggactctcacttcacaagctaaaatggaacaacctacagcaaagagcctttaacagctcattttcaaatgttttcttcatattatgacccttgtggttagaaatatatttatgatttctagtgaagatatgagcttaaagttttagtgaatttgtaaagacattcatctaataagttgaattcttaaattggatatctataacaagggagttaaatctgatagatttaagatttttggagtttattgtgagttgatgtaaagaaaactctattttatgttaaaatataagtagattttaaaagtgtattttggtaaagggagagaaaggtattaatatataataaaaaataaattattaaaatatcagtaaataattatagagttttagtaaataagtgaagaaaatgaaaaaatgtatctaagaaattgtattgagatattaaaagattaggtaaatttatgtcaagataaagaattttacaaaagaatggaggtacgttatggagaacaaagaactattaattgaaaactcacataagagaagcgaaagttatggagttgaaaaaaattcagatcattcaaataagattcttactggtgaagaattagaaaatatattaactattaataaagaattaatagaagtatctaaaatatacatagatatggtattttcagcagttatggataatgaatttattatagtgttaacagataaaaatgggtgtattctatatattaaaggagcagaagaaaataatagtaagcttggggggaataatcttgaagttggggcttatatggacgagcaaagtataggtactaatgcaatgggaacagcaattaaagaagacaggtgtattcagataactgcaactgagcattacataaaaaggttccacaatttaacatgctctgctgcacctattcataatacaaagggagaaattattggaacattgaacttaacaggtagaagagatatgaagcatccacatactttaggtttagttgtttttggtgtaaaggcaatcgaaaatgaattggacaagaagggtatacgtgatatattgaatcaaacctataactatatggagagtgtcatagataatgttgataaaggcatcatgatagtaaataaagagtataaagtaataaatataaataaacttggagtagagatatttaatatagataaggatttgataataagtcaagatatacattatattttgcctgatttgggaaatgtaatagaagaacttgaaaaccataatggtgatattataaaggaattaaaattaaaacatacaagcagacataaaataaagttagtttttaaaggtcttaaacataaagataatattataggtatggttgtaacaataagttatgaaaaagaaggaaaagacaacaaaaatgcaacaggggcattttttacttttaatgatataattggggatagtgcagccattgttaatgtgataactaactgtaaggttattgcaaatagtccttcaactgttctaattcaaggggaaagtggaaccggtaaagaaatattagcacaggctatgcataattatagtgtaagaagaagaaataaatttgttgcaataaattgtggagctataccagccaatataatagaaagtgaattgtttggatatgaggatggaacttttacaggaggaaaaagaggcggaaatccaggtaagtttgagattgcaagcggaggtactttgtttttggacgaaattggggaaatgccacttgatgcacaggttaagctgttaagagtacttcaaaatggaagagttacaagacttggtggaagcaaagagattcctatagatgtaagagttatagcagctactaataaaaatttaaaaagagaagttcaaaaagggaattttagagaagatttgtactatagattatgtgtaattccaatcactttgccgccgttaagagagagaaaaggcgatgtaaaaatgcttattgacttcttcttaaggattaaatcctttcagttgaataaatcaataccggagcttgataaaagtttatataataagttattagactatgattggcctggaaatataagagagcttgaaaattatattgagaatatagtaaatttagatggacgatcatcttttaatttatgggaatttgaagataatcaaagtgttgagatagacaaaacatatgataggaaaatattaaaagatgactttttaagtaaagagatatgggaagacgatcagacaaatggctttttaaagaatgttaatactgaaaagactgagtatatggtgaatactttaaacttagaagaacttgaaatgaaggcaatccatgaagctgtaagaataaataatcataatatgacaaaagcggctaaaactttaggtataagtagaaacactctatatctaaaattaaaaaaacgtaaataaattataaagcatgtcctaaaatattacgctgtattaaatttatgctgtattattttaggacatatctttgttaaaaattatttatataaatgagtatatgcttaacaattaatctatgtataatttattttttatatatttaataacttaatttaaaccctttaaatataatatttctcaggaattatgagttttttgttagaaaagtactcttatattttgacattttattatcataaatataaaatatattgataaaataatcacaagttggcatgaatattgctttaataatttatgtggtcaaaaatagacatattaacttattattttacaactatgcaaaataataaatgaacaaattttaggaggaaatatttatggcacgttttactttaccaagagacatttatcatggagaaggagcacttgaggctcttaaaactttaaagggtaagaaagctttcgtagtagttggtggcggatcaatgaaaagatttggttttcttaaacaagttgaagattatttaaaagaagcaggaatggaagtagaattatttgaaggtgttgaaccagatccatcagtggaaacagtaatgaaaggcgcagaagctatgagaaactttgagcctgattggatagttgcaatcggtggaggatcaccaattgatgctgcaaaggctatgtggatattctacgaatacccagattttacgtttgaacaagcagttgttccatttggattaccagaccttagacaaaaagctaagtttgtagctattccatcaacaagcggtacagctacagaagttacagcattctcagttatcactaattattcagaaaagattaaatatcctttagctgattttaacataactccagatatagcaatagttgatccagcacttgctcaaactatgccaaaaactttaacagctcatactggaatggatgcattaactcacgctatagaagcatacactgcatcacttcaatcaaatttctcagatccattagcaattaaagctatagaaatggttcaagaaaatttaatcaaatcatttgaaggagataaagaagctagaaatctaatgcatgaagctcaatgtttagctggaatggcattttctaatgcattacttggaatagttcactcgatggctcataaggttggtgctgtattccatattcctcatggatgtgcaaatgctatatttttaccatatgtaattgagtataatagaacaaaatgcgaaaatagatatggagatattgcgagagctttaaaattaaagggaaataatgatgcagagttaactgattcattaatcgaattaattaacggattaaatgataagttagaaattcctcactcaatgaaagagtatggagttactgaagaagattttaaagctaatctttcatttatagctcataatgcagtattagatgcatgtacaggatcaaatcctagagaaatagatgatgctacaatggaaaaattatttgaatgcacatactatggaactaaagttaatttataaaataaataaaggcaatttttttatttcataatcttatagagataaagtaagttgtttcacattaaaaatcatgtaacttttaaaaagttattgaagtaaataattgaataattactaaaagaatcgttacaacattgataaaacaacaatgactctccacctcagggagtctttgttgttgatatggaaacaaggatgaaaattccaattatcggatatatcttatgtttagaagctgtaatcctatcgcttctttaagtgatatgtaacagttgtatgatcataaataaatttcagctaagattcagatagggatcaaactctatctaagcaagtttaatatgaaattatcaatagaatttataagcgtagggggtactaagagtgtacaaaattgttaacaaaagagaacttaccaataacatattcttaatggatatagaagcgcctagagttgctaaatcagcaaaaccaggtcaatttataattataaaaaatgatgaaaaaggagaaagaatacctttaacaattgcagattataatgcggaaaaaggtacagtagctatagtttttgcagctataggaaaaggaactaagcagttagcagcatttaatgttggagattatgtttcagattttgtaggaccattaggtgtaccaagtgaatttattcatgaagatctagaagaattgaaaaagaaaaatattatctttattgcaggaggagtaggggcagctccagtttatcctcaagttaagtggatgcacgaacatgggatagctgtagatgttattttaggaagcagaaataaagatttattaatatatgaagaagaattaaaggcagttgctggaaatctttacgtgacaacagatgatggttcgtacggttttaaaggaactggttcagatatgcttaaggaattagttaataatcagggtaagaaatatgatcaagctgttatcattggaccaatgataatgatgaaatttacttcaatgttaactaaagaattaaatattccaactgtagtaagtttaaaccctataatggttgatggtactggaatgtgcggtgcttgtagagttactgtcggtggaaaggttaaatttgcatgtgttgatggacctgagtttgatggccatttagtagattacgatgaatcgatgagaagacaagctatgtataaaacagaagaaggaagagaattattaaaacttgaagaaggaaacactcataaccatggtggttgtggatgcaaggaggataagtaatagagatgaacgatagaatgaaaagaacacctgttactgaacaggctccagaagtaagagcaaaaaactttaaggaagtttgtttaggatataatgaagatgatgctataaaagaagccaatagatgtttaaattgtaaaaatcctaaatgtgttgagggatgtccagtatcaatcaacattccaggatttatatcaaaagctaaaactggagactttgaaggtgctgctaaagaaatagcaaaatacagtgcacttccagcggtttgtggaagagtatgtccacaagaaaatcaatgtgaaggtaactgtgtacttggaattaaaggtgaagctgtagctataggtaaattagaaatgtttaccgcagactggtcaagaaaaaataaagtagatttatcgcaaacagaaccttctaaaggaaagaaagttgcggtaattggaagtggccctgctggtcttacttgtgcaggagacctagctaaaaaaggttatgatgtaactatatttgaagcactacatgaagcaggtggagttttagtttatggaatacctgaatttagattaccaaaggatgatgttgttaaagcagaaattgaaaatataaagaagcttggagtaacaattgaaactaatgtaattgtaggaagaacaataactatagatcaattaattgaagatgaaaaatttgaagctgtattcattggatcaggagcaggtcttccaaagtttatgggaataccaggagaaaatgcaaatggtgtattttcagctaatgagtttttaacaagagtaaacttaatgaaagcatttaaagaagaatatgatactccagttaaagcaggtaaaaaagttgctatagttggcggaggaaatgttgctatggatgcagcaagaactgctttaagacttggtgcagaagctcatatagtatatagaagaggtgagtcagagcttccagcaagagcagaagaagtgcatcacgctaaagaagaaggagtaatatttgatgttttaactaatccaacagaaatcttaacagatgaaaatggatgggttaaaggaatgaaatgcgttaaaatggaacttggagaaccagatgcttcaggaagaagaaagcctgtagttaaggaaaattcagagtttgtattagacgttgatacagtaataatgtcacttggaacttcaccaaatccattaatttcatcaactactaaaggtttagaaatcaatggtagagcttgtttagttgccaatgaagatggattaacaactaaagaaggtgtttatgctggtggagatgcagttactggtgctgcaactgttattttagcaatgggagcaggaaagaaagctgctgctgcaatagatgaatatttaagtagatagcatttaacatattatatattaagaagattagttacagggaaatatagatgtaactaatctttttttgtttataattttagacgatatttaacaaaaattatttttttaaataaaaataatgtctcaataaaaagagaaaataatcttaaaaatctctaatttagtattcctaatgatattatttgttgattttattataaattaatgataatatttcatatatatgaaataagtacatattgatgcattatattacaattggaagctatgaagaattctttctaagtgggcactttaagagtttggagctagttgtgcaaccgaccaattaagattaattaattattttattagttagttttaattggttttttatatgaaaaaatttacttgatttatatataaataagaacttatatatcttaattttaagtatgatgtaggcttattgagatgagattttaattttcatgaaccaaaattatactacattaagggttggattaagaggtatacaagtattaatgaaggggatgagactgttatggatatttttgtagctagacagcctatatttaacaggaaaaatgaagttgttgcatatgaacttctatttagaaatggacaaaataatttctataacaatactaatggggatgaagcaactttaaaggttatagctaatacattttatacatttgacttcaaagatattactgataacaagaaggcatttataaattttactgaagaattgataaagaaagaaatagcaaccatacttcctaaagaatatgttgtgatagaaattttagaaaatatagaaccaaatgatgaaattgtggatgcgtgtaaaagacttaagaaaagaggatttatattagcattagatgattttgtattccatactaaatatattaaattaatagaaatagctgatattataaagatagattttaaaatcactacagggggagaaagaaagaaagtatttgaactaaaaaaaataaataataaaataaagtttttagctgaaaaagtagagaacaaagaagaatatgatgaggctttgaaactaggatattcatactttcaaggatattattttagtaaaccaatagtgctttccagaaaaaacattccgactaacaaagatacagcaataaaaattttaaagttaattaataaagacgattttgattttaataaattagaggaactaataataaaggatttaggtttatcatataaaataatcaaattgataaattcgtctgcatactgcctaaagaatgaagtaagatctataaaatatgctattgcacttttgggaagaaaagagattataaaatggttatatgtagttctgctaaatgatctaaaggaaaataacacagatgaacttataaaagtctcattgcagagagcgaagttatgtgaattaatatgtaatatgagtgagtataaaaataatgtttattcagcttatatggtaggattattttcagttatggacgcaattttaaattgttcaattgaagtgatcttaaaagaattatatatagatgatgaaataaaggaaggactaattgaaaaagataattacttgaataaaatattgaaattggctattaactatgaaaagggtcagtgggaaaatgttgagttttatactaaggaaataggtgccaatgataataagcttgcagaagcctatatagatgctataaaatgggcggatgaggttgtgagttaaaaaaataagaaactagaatatgtctagtttcttactctaattggtaaaaaaagaaaatactatatcaaaactctaggaaaaatttcaatataagtaaattgtatatttacattaacattatacgacataaactgttttaattcaacaataaaaatataaaaaaggtgcaaatggcaaaaaaaaataataatatattatttttcattggaatactattaaattttaggataaatattctaaaattactaagaggtataagtaattaaatcaaaaaaatgataggagttttagaaactgatttttaatgtgaaaagagatagcagttagattaataaatgctatctcttttggtgtagttgaaaagtaatattttcactaataattatttgcgaaatttaaagatattatacataaaaataaaaaaataatgacaaaataataatatctttagatttactaagtactcctttcagttataaagggattaggcgtttgcgaaacgccgcaacccgcagaaatgcgggatatttttttagcaaaataaaataactcctcactgatttatggtaaaattgaattgcctaaaaacaaaactaccatatacctcagaaa

SEQ ID NO: 122 - DNA, 15409 bp, Clostridium beijerinckii
tgtaatttggtttttagcataagtaaattatacaatgaatgtgagttcttcggaattcacattttttatatctaaaaaaatgagccgctacaaaactaactatgttagttttgcaacagccccttttataaagaggttgactctattccaactatagactttataatttatattaggaaatatgtttgtaaagggaagataaaaatatgtttaaaaagtttttaaaatactctattccatcagcatcggctatgtttgtatcgtcattatatacagttatagatggtatttttgtaggtcgaggtgtaggagatttggggttagcagcagttgcaattgcaatgccagctacaatagttttatttggaatagctacaatgtttgcagttggcggaggtgctctagtttctaaaaactttggagctaaagataaagaaagggcagtatatatttttcgccaagcatttaaatcaattataatattaagtagtattattagttttgtatttatagttttttcggagtacatagtagttcttttgggggcgactgaaaatttgaaggagttatcggcagaatttttgagatactattcattgttttgtatacctagtttgttaggaataactttgaatggattcattagaaatgatggaggtcctaagttagctatgatatcaacgatagctggtacagtggtaaatatattattagattatatatttatatttcctttaaatatgggtgttaggggcgccgctattgctactggacttgggcaagtggcgacaatagctataatactgcctcattttttaaagaagaaaggtcaattaacttttggaaatgtgaagctggaaatgaaagtggttaaagagattattaccataggtttcccatcgttttttgcagaagcagccttttcgataataatattcttctataatatagttttaggaatctatatgagagaggaaggaattgcgtcatatagtataataaattatataactacaaatatttatatgatgcttctaggtgttagtttaggagcccaaccattaataagttactattttggagcgagggagacaaaaaagatgtttacattttataagtttgcactaatagcgtcagtctcggtaaacttattgtttaccttagtatgctttatatttggaagaaatcttataggtttgtttacaacagataaggaattaataaatatagcgtatattggacttaatatgactaatttagcttattttttcacaggattaaatttaagcacatcgatgtactatcaatctatagaaatgccaaagttctctaacttaatttgtgcttttagatcttttgtatttttgccagtaattttatttttagctgcacattattatggtacaaatggaatatgggctagtatgattttttcagaaatattaacgtttttagcagtaaacattgttactaatacaaaaactaatacaaaaaaagctatatcagtataaggtggcaagggggataaatattgagtaatttttctattggggaaatgtcaaaattgaataacatatcaattcagacactgagatattatgacaaaataggcttgctaaaaccaaaggtcattagtgaaaaaagccaatataggtattatagtatagaacaattttttcaaatggatgtgattaaatattataagacattgggattatccctaaatgaaataaaaaaattaatgggtagaagcacttctatggaagaaaaacttgatatgataaattttcagcaagaggttttggaaaataaactattagaaatggaaataataaaaaatcacttagagtatatgaaaaacacagtttcttcaattattgaatatgaaactgataaaatatttattaaatataatgaaaaaagggaatatataagttatgattgcgtttcagccactattgatgaattggaaattaattatagaaaagtaatgcctaatagtgaaaatcagctagaaaaattaagttatgaattatcctcaatggtttcctatgatgagttaaaagaaaagatggtttataagaatataatgacaaataattatgtaagaatgttaaaaaatgaaggaagggcaattgtcttaccagagggagagtatataacaatatattttgaaggtggatgttttgaaaataagaaatattataataaaattattgattatataaataagaataatattaagataagtggcgatttccatgaagtgtatatccttcctcaagtaaatgaagatggaaaagagaatactttgatgaagcttgagataatgaaaaaaagaattaacatatgttaaaagaaattcatgataaactgattgctctgacagatgaagaattaagaattttaaatggagagaattctgtagatagaagtatttatacagattatgatgaaggagaatatctatattttaaagcttctgaaagaaaaaatattcaagagttattagaaaaaataataattgagctgtatactaattcgataatgaaaaagcgacaataaaattgctagtagggcttttattagtggagttagtaaaaaattcacaggatatagagacatattctgtggataactatgagaagatgttgataattcagagtcttaaatacatagaggaattttatagtacagctactctgctagaactctcagaaaaattaaatcaaccagattataaatttagcaaatttataaagatacatactaaaatgacttttaaagaattattgaaagaaaaaaagttaagcaaagcagttgaattaatcaaattaactgagtattcgattattgaaataattgagtttgtaggatatgagaatccaacatacttttacaagatattcaagaaaaaatttggaatgacgcctagagaatataaaatgaacagaattaacaattttagatttacttaaattagaaaagtttctaagttgaaatgaaaggaatatataacttttaaataatttaatttatatttaaagattatttattcagcagtgctatagtttagaataaattttaatgggttaatctcttttaaaacatatataatgcataattgaatgaagaagctatcttaatgaaaagttgagagagcttttttattggtaattgagatgatttgaggttacttactttgaattgaaagaggtttaacattatgctatgattattttagtaaacgttattttggtaagtattaggacatagagtttgggtgaattaaattttaagtataataatgagaggtgtagagatgagatatttagtgttagatgtaggtggaagttctattaagtatgcactgatgacagaggatttggagtttattgaaaggggtaaaaaaccaacaccacttgataaaattgaaagttttatagatgtaataggcgaaatctatgatatatataaagatgatatagaaggaatggctataagtatgccaggagtattagatagtgaaaaaggctatgcttatacaggtggtgcactatcatataatgaaggtaaagagattgtaaaaattcttaaagaaagatgtccgacaaagattacaatagagaatgatggaaaatgtgcagctttagcagaggtttggaaaggaagtttaaaagatttcgatgatggagttgtaatagtactaggaacaggtgtaggtggaggaatagttcgaaataagaaaatccataaaggaaaaaacttctttgcaggtgagtttagttttataaatacaaatgtaaataatactgagaacacggatgagtgttggggatctataagtggttctaaagcattgataaatgaagttgcaaaggtaaaaagtcttcagccagatgaattagatgggtataaaatatttgaatatgcaaataacaacgatccagatattcttgaaattttagatgatttcacttataagctagcagtacaaatttttaatttacagtgtatattagatccggaaatatttgcaatcggtggagggataagtagtcaagagatattgatacaatatattaagaggaatgtggacaagtatcacaagagttttgaaattgatgatttaccactacctaatgtagttggctgtaagtttagaaatgatgctaatctcataggagcactatacaattttataactagcaaatgaaatatgattgtattaaatgttggcggcattttatggaagaatgtcattagcatttagcttttctaataataacattatataaattaacttagtaataatatataaaatggagtgattctaaaaagaatcgctccattttatataaagattttatattaaacgttgaataacatatcgctataagttggaagtggccagaactcttcgtctactagagtttcaagcttatcagcatcagctcttaaagtattcatttgttcaaatacttcatatctgtacatcattcctaaatcgaatatatcaccttcgaagttatcagccttttcaactgctttttcaagaagtgaaacatttttatttaatgaagctaataaagttgaaatttcagttaatgattcagtttgaactgaaatatctacatttatacctgtagcctttattgtgtttattgattcagcaagacttgtagtatattgaattacagcaggtataatttgacgttttgccatttcaagtgttgttaaagcttcaatatttataattttattgtagttttctaaagtgatttcataacgagatgttgattctactctagttaaaactccatgcttttctaatacagcttgattcttctcatctatcatagctttagcagcttctacagttgagtgaatatttggaagacctcttctttctgcttcagcaacccattcatctgaatatccattaccattaaatataattttcttatggttcttaacaatatcagttaagattgcttggatttcagcatctaaatcagtagccttttcaagtttatctgcaatttcagataaagtttcagcaactatagtatttaatacaaagttacatccagcaattgaagcagaagatggaaccattctaaattcgaatttatttccagtaaacgcaaatggagaagttctgtttctatcagttgcatcctttggaagtggaggtaatgtatttactccaatagttaattcacttgcagacttagaacttgtagctggacccttttcaatttgttctaatacatcctctaattgatcgcctaagaagatagagattatagcaggaggagcttcgttagcacctaatctatgatcatttccagcattagcagctgatactcttaataagcttggatattcatcaacagcttttattacagcacaaaggaataaaaggaattgttgattttcgtgtggagatttacctggttcaagaagattcattccatcatcagtacccattgaccagttattatgcttacctgatccgtttacgccagcgaatggtttttcatgaagcaagcaatataaatcatgttttgcagcaactttcttcattatttccattgtaagttggttatggtcagtcgatatatttgttgtgctaaatataggagctaactcatgttgagcaggagcaacttcgttatgcttagttttagctaatattccaagcttccaaagttcttcatctacttctttcatgaaatcagaaattctttgtttgattgttccaaagtaatgatcttcaagttcttgaccctttgaaggttttgctccgaataatgttcttcctgttaagataaggtctttacgagcatcatacattgacttatcgattaggaagtattcttgttcaggaccaacagttgtaattactcttttagtagtagtattacctaatgcttttaaaacacgtagagcttgtttgtttaaagcttccattgaacgtaataatggagttttcttatctaaagcttctccgttataagaacagaatgcagttggtatacataaagaaccatcttttaggaatgctggtgaagtacaatcccatgcagtatatcctctagcttcaaaagtagctctaagtcctcctgaagggaatgaagatgcatctggttcacctttgattaattcttttcctgagaattctaatataacttttccgtcagaagttggatttataaaagaatcatgcttttcagcagtaattccagtcataggttggaaccagtgagtaaagtgagtagcacctttttcaacagcccaatctttcattgcagctgcaacaacatctgctacatctggttcaagagtagttcctttttcaattgtcttttttaaagctttataagtagctttaggaagacgttctttcattacagcatcgctgaatacatttgaagcaaaaatttcattgattttgttcattaataagatcccctttcagaatacacaacatttatttaaattaatattaactaattaaaaacattaataatttaaaaaaaattttagagtataaatgataaattgtcaacaagaaataagaaattgccacatagaagtttttgccatataaattcatatatggcaaaaaattcatattaaaaaaataaaaagctaaagaattattttaatattctctagctcctttgctaaaatcttattcaattaataaattaaacatagttaatatataacactgctaagactaccatagtcttaagtattttctataataattatactatattgttataggttgtacaatacaaaaatccgattttttgcagtaaaaaattagtagaaatttaaatgtttatattatatttttactaattttaatataagaattataattaaaaaaattattctgatatggttttattcatagaagatatattattaaggtatataagttcaaaataacataattaattttttataaaattaattatgttattttgaatttaattttatggtaatatattaagtaaaaaagtttctagtctgatcaaaagatattagtttttatatagagatgaaaagtatgttcaggtatgttagtgacataagcaggatttctcactatataattaaagaatttttgcaaaataggagtgaagaagcacctattctaattgtaatataaaaaaataatattgagaaaaggaagagtattatggaaaatgtatattactataacactaaaattgggaaaatcagtatagtggaaaatggggcagcaattacaaaaatttgttttgtaaacaaagatgaacttaatgttgaaggaaatgaaacagagttattacggaaagctataaaacaattggaagagttttttgaaggagagcggaattgttttgatttaccattagcacctaaggggacggagttccaaagaaaagtatggagtgctctacaagagattccttttggagaaacaaggagttatggtgaaattgcccaaatagtaggtaatgagaaagcggcgagagctgttggtatggctaataataaaaatccaattccaattataataccttgtcatagagtaattggtgctaatggtaaattggtcggatatgctggtggtcttaatataaaggaaaagcttcttaaaattgagaaggattataaaagatgacttaaaaaataatatgatttaataatataggtgagcgagtctttataaatagtaaactatttgtagagatttgctttttttacttacgacaaataaataacattgtttcaagtaaagtttcagttctttaaataattattatataaggtattttaggtgaatgatgattaaagtgcttataagtattgaaaaaataattaaatgtacttataattacttatgaggggtgattttatgattgggaaagaagggtatgaaaattttaataaagacaatatattttcatataaggagaggttgaaattaaatgttaatgaaaaaactaagattgttgaaaaggcaatgaaatttattcataacaataaaacgtatttttttgatgtttctactagtgttgaatttctttcaagatctttagataaaaaagcgaccatatttactcattccatagataattttaatatactttcggaaaagaatggtattgtagtaaacttgattgatggaaaatttaacaagaaaaatcgctttttctatagaaggaattatgatgagtatttgagcaaaattgagtttgaggcggcatttataggagctggagctataaaaggtaatggtatttattatgaaaatgaagaagatgcttatattaaaggggagattgtgaaaagagctaagaaggttattttacttgccgaacatcaaaagtatgaaaaagatgccttttataaaggattaaacctagatcgggcagatattattattgttgatccaatatcggtttcttcttttagtaacattatggaattgcataatattaaaattaatcctaaaagtctagtgattatataaagaaaacatattaatttaagtagtgttatttaggagaataaaattgagttttatttgcttataaatattgaattcaataagcaattataagtaatttgacgttttattataaatagttaggggatgagtctatggataaatttggaatgatatgtttagatattgatggaaccttgttaaattcaaatcatgaagtaactgaaaaggtgaaaagtactataaataaagttgcaaataataagaaaatacctgtaattttagtttcagctagaatgccaaaaggaataaggtttcttcaagaagaacttggaatagaggaaccaattatatgctatagcggtgctttaatcttagataaggataatagtgtattggctagtgaggcaattgatgtttctaattttgagaaaatatataagttaacaagtgaaaataacattcatatgagtttatataaggatgatgaatggtatatagaaaaattagattattgggctaaacaagaaagtgaaataactaacatcattcctaatattattgattttaataaattaatagaacaatggaaaagagaaggagtaggaccaagtaagattttatgtatgtctaatccaaaggaaataaacttcttaaaagaaaatatttatggtaatgatttaaatatatatccttcaaagtcgacatacttagaaattatgcctataaaagcatcaaaaacatctgcaatcacctgtctacaaaagaaattcggtatagataaatcagaaataatagcaatgggagacaattataacgacattgatatgttagagtatgcaggagttggaatagcgatgggaaatgctccggaagacgtgaagagacatgctgatgatgtaaccttaactaatgatgaagatggggtagcagaagcactgataaaatatgttatcaacaagaaataaagaaaatgttttacagccgttttatttagaactttcataaaattctttttttagagatgaataagcatagataataagtataaaaaaatttaagtttaactcatgttatttaatttatgtgaaatagaaatgaattacatatatttgtgtaatgtttatttataaacttaagcaaatgtatgtaatttatttcaattccagcctttttatatttgaaatttattagttttttatttaaaaaatttattttatatctgtataatatgcatatcccataagtctactaatatttttagcgacattcataaattcctctttgtattttagtaaatcatccatagtattaaagagtgttacggatgagagactggttgcagcaataattttattggttctatcaaaaataggaacagctatgcatataacacccgtatcgtattcgatattgtctaatgcatataggttctttcttataacatgaatttcttctataagaacatttatatcagttattgtgttctctgcatattttatgaattctgtatcttttaataattctcttattttatcatcagaatattgagataatatcaatttaccagaagcagtacaataaataggcgctttttttcctatactagaagacattactatatttctactagtattttcggaagataccttatctacataaattatgttagtaaatgactcgtcaggaatacaaagatgtatgacttcatcaaacttattagcaaagtcatatatatgaggcctagcgacatttattaaatccatactatttgttatagaagaagataagttaagaagcttaattcctaattgatatttatcgttttctgcattttgcgtaacatattctttatattttaaagttgtaattattctatgtatggtactcttgcttaaacctaaattttttgacaattcagcaattccacatccttttggatattcggctaagcaatcaagtatatcaagagcacgttccaccgattgaactaagtttggattgcttaaatcctctgacatataaaatcctcctaaatagttttatctttatactacattgtaatgtttaattttaattttaacaaataaaaagttaaaaattttatttttataccagtatcattgacaattgtaagtgatgatattagaattaagataataaatgaaacggagttccacaatacggaacgatggcgtgtattgaaaaaatttaataatacatgtaaggatggaaatatttatatggaaaggagagaatagataatggaaaacattttgaatcagttttcaatggacttttttagattagatggaaaagtggcaatagttactggaggaaatacaggtcttggacaaggatatgcagttgcattagctaaggcaggagcagatttagttatttctacccacggtgataattgggatgatacacgagaattgatagaaaaagaaggtagaaaagcggtattcgtgaaagcagatttaacacaaaaagaaggaaggaaagatgtgattgattctgcgatgaaattttatgggaaggtagatatattagtaaataacgctggaaccataagaagaacacctcttcttgattataaagaagaagactggaacgcagttatggatattaatttaaatgctgtatatttcttaagccaagaagttgctaaaataatggttaaacaaggatctggtaaaataataaatatagcgtctatgttatcatttcagggtggaaagttcgtgcctccatatacagcaagtaaacatggagttgcaggtataacaaaggcatttgctaatgaattagcgagtaaaaatattcaaataaatgcgatagcacctggatacataaagacagcaaatactgaaccaataagggcagataaagaaagaaatgcagaaatacagggaagaataccagcagatagatgggcagaaccatctgacttaatgggagcggtagtgtttttagcaagcagagcatctgattatgttaatggtcatattctagcagttgatggaggatggttagtaagataatcagtattcaaaattatatataaatattgactaaaatttaaaaatggccttatcaaaagtatgaatatagaaatctatctctaacttatttggtaaggttaaaaacaaatatatagtgaaagtggtgtatttatttatggacgtaattactataggagatgcaatgattgcaatgtgccctcaagaaaagggaccaataatattttgtgacacattcaaaagaaaagtaggtggagcagaattaaatgttgcaatgggatgtgcaagattagggttaaaatctggatggataagtagattgggaaatgatgatttcggaaaatatatactaaagattgtaagaggtgaggggatagatacatcagaggtacaacttgttgatggatatccaacttcagtatattttagagaagttttatctgatggatcaagtagatcattttattatagagaaaaatctccaactagtacaatggatgcaaagaaattgaatgaagaatatataaaaaatgcaaaagttcttcatattacaggagtttttccttcaataactgaaaataatagagaagttatattagaagcagtaaaattagctaaaaagaataatcttataatatcatttgacccaaatattagattaaagatgtggactaaggaagaagcaaaagactatatagaaaaacttttaccttatgttgatattcttttaataggtgatgaagaaatagagatattattgggagatacaaatatagaagaagcaataaaagttttccataacaaaggaatagaaaaagtgatagttaaaaaaggagccaagggagctataggttcagatggtaaaaatatttatgatattgaagctattaagccaaaagctttagttgatacagtaggtgcaggagatggatttgcagcaggatttttaacggccttattaaaaggtaagtcactagaagattgtgttagatttgcaaatgcagttggatcattagttgtaggtgtcgaaggcgataatgagggactaccttactatgatgatgttttagtacatttaggacaagcaaagaaaatagaacgttaagaaatatatatttgtatttaataaagtattttatgaatgatgtagattaattttaaataaaataaattaaagatgaggtgtaataaataatgtttgaaaaaatttataatacattaaaagaagaaaaggcagtagctgttattagaactaaaacatatgaagaagcaaaagaaataagtatagcagcaatcgaaggcggaatgaaaattatagaggtaactatgagtgtgccaaatgcgccaaagttaataaaagaattgaaagaagaatataaaaatgcttgtgttggtgcaggaactgtgttaacaaaagatgctgtagatgcatgtatcgaaaataattctgattttattgtttctccttgtatagatgaagatgtaattgcttatgcaaatcaaagaaaagcattaataattccaggattaatgacaatgtcagagttaaataaggcttacaaattaggtttaagatttatcaaagtattcccaggcaatgttgttggaaaggcatttataggggcagcaaaatcaatattcccagaccttagcgttatgcctactggaggagtaaacaaagataatataagtgaatggatacaagcaggagcagattgtagcggtataggtagtgatttaaataaagtttataaaagcaacggtgttacaggtgtaaaagaatattgcgcagatgttataagtaaagttaaaaatttataattttcagtaaagatttaaagcacttaattttattgattaagtgctttaaatcttttttttattaatgattttctgagctatttataaaatagttatgttaaaaggcagattgttttagaaagcaacagatactattaatattatttaaaatgtagggttaaataatatcaatttgcaatttatatttagaaatttatctattgaataaaaggctaagtgtagtgactttatattaaaaaaatgatatattaataaaaaatgaaccgagtatgattaaaataatgagtagaaagaaggtattatacatgtatgaaatgaaggaagaatacaaaatcggaattgatcagattgatgagcaacacaaaaagctttttgaattagcagatcaagcttatacgctgttaaaagatgaatttgcaattgataagtatgataagataatacatattatggacgaactgaaggattatacaatttttcattttaaatcagaagaagaatatatgaaaagtataaactataaaagactctttactcaaaagattgagcatgataaatttattaaaagtcttgaagaaatcgattataaaaatattgatgaaaatcaagatgaaagtttaataaaacttttgaattttttaaatgattggttaacagagcatatattaaaaaccgataagcttataggagaataatataattataataaaacggttaaatttttattataattattttgcggtgagggtgagatatagaaatcttactctttttttattaaaaatttagaaatgtaaaaagtgctcaaatagatgttgcaaagtattgattaaagttatataataaagaaaataaaatatatatcttcagggcagggtgtaaatccctaccggcggtatagcccgcgagcttttaagaaagcagattcggtgtaactccgaggccgacagtatagtctggatgaaagaaggtaacctattaggaattgaaagttgatttattattacttgctgaatgtatgccctgatgtattttacatcagggctttttgttttttttattaagtattgcaaatagttcaggagtaactaatgtactaagaatactttggcactaaattcctaataagctacaccaagaagataatcttttgggaggcaaagaatatgaatgaaaaaacaagtaaattaatcaaaatctctttattatcagcaattgcaattatacttatgtattttgattttccaataatacctgcgtttccatggcttaagatagatctaagtgatgtaccagcattgttgggtgcttttggatttggtcctgtagcaggggtgataatagaattaataaaaaatcttttggttccattaatcagaggaagtcaaacaggttttgttggagagacagcaaacttcttgtttggagcagcattaattttaccagcatcatttatctactatagaaataagaataagaaaaatgcaatattaggaatgataataggtggaattgcaatggaggcaatgggaatcgtgggtaacatatatttattattgccagcttatgggatgaagatgccagcggatatgttacagaattatgtttgggcattactagctttcaatggagtaaaggcggttatggtgtcggtattaacatatattctatacaaaaaagtatctgtttcaatttttaaggttgaaccaaactttggcagtccagaaaataagacaaaaattgtataattttaaaataatataagcagaaaaagctgtaacaaaataattcgaattttgttacagctttttattgtatattggttggtatataaatttaatgttatatataaacattaatattaaattgatttttaacatgattattaaataagctaaagatgattactcatttaatatcagatcaaattttaatagcaactattcacataaagacgagtgctttctccttttaaattttataatttagatttaatttggcataatggttataataatatataaataattaacgttaaacagataga

SEQ ID NO: 123 - DNA, 15395 bp, Clostridium beijerinckii
aatatggataataaaattaaattatataaaatttggggcacatttatatttttatgcagttttttataaatttatgttataattaaggaaattatattaaaataactaaataatttgttgaatagagaaggattaaaaagatggaaattctatcattgggagaaaagatcaagagaagaagaaaacaattgaatatgacgttgaaggatttggcaaaagacagaataactccaggacaaataagtttggtagaatctggccgttcgaatccatcagtagatttgctagaatatttagctgatgcattgaacacaaatgtagaatatttaatggaatcagaagaaagccaagctgaaaagattagtttatattacgaacaggtaggggaatcatgcatactccagggagattacgaaaaaggtcaaagatatattgataatgctctatactactgtgaaaaatataatctagaatatagaaaagcaatgatatattttataacagcaaaatcctacatgtataaaagagattttcctatggctcagaagttttttttatcagcaaatgtaatttttgtaaaaaataataattatgagcagataataaaaactttcctacatttagctaatattgctttagaattaaaggcatatcattcttctagtagttacttaaaacaggctgaaaaggtatatatagacaataaggttgtagatgaatttttaatgggagaaatatactacaatatggctagaacatattacgatgtagaagaactggatttagccttagaatattcttgtctagcaagaaatagatttgaacaagtctataatgatgaagattatgcgagaaatctattctctttagcagaagaatttaataaaaaaggtgacttgccgaatgcaataaagtattcaaagaaaacattagaagtatataaaaagatacagtataacaagagcatagttaatatagaacataatttaggaaagttattttatgaactaggaaatttagatgaatctcttaagcattatgatatatcaaaaagtattagtacacaaaatcgtgtaggatgtataaatgatatactaatagatatttgtaaaagttatctgaagttaaagaatactgaacaatgtagcaaaatactaaaagatatagaaaatagaattgaagagcatgatatagacagaaaaatcgaatgtaaactaataaaatatactatgttcaatattgacgataaaccagaacaagcagaaagtgtattgattgatacatatgtgctagcaaaaaatagcggaaagttgtcgaaggctgctgaattagctatgagagtcggaaaatatttcatagataaaaaagaagaagaagaggcttcatattacttaaatcaaggaataaagttatttgatgaagcagaaaagttagaaaattacaaattataagtaagtgggtgagatatttggaaatactatctactggcgaaaagataaaaagagctagagtatttaaaggtataacattgaaagaattatgcggaaataagatttcaattgccaagatgagctgtatagaaaatggaaagattaaggcagataccgaattactgaattatatagctgagaagatagaaatagatgtagattatttaatagaagacgtatatgaacaaatttcaaataatctaaatataataaagaggaatgtatcttccgatactgattctgaaagtaagttgaaagataacctaagctatgcactaaaatataaatattatgatttagcttttgaattaatacacatattattctcgtattatgtagaagaaaataaggttgaaaatattcagcttatagtttctcaatattatgatttatatcaaagaaataatacggaagaaaatacagctatctactttaaagatatggcacgttatttatctcaaaatggtgaatatattgaggctatttcttactacagcaagcttagagaaatgtttagattgaaagaagatggatttgatagttcagagtactgtttaataggctacaatgaggctctgtgttatcagaatttaagaaaatctgaagaagcatatagcattttatcagaaatcataggatatgttgatgaccttaaaacagatgaaagcaagggaaaaatatatcatatatatgctacagtatgcattaagcttaaaaaagattatgttgatgaatataaaaagaaagcatttcaatatcaaaaatataatcctatttctctggcagcatcccatggaaattatggaaagtattattttgaagtagaagaaaaggaaaaagcaatctctgaaatagaagatggaataaagatatttccacaagataatgtagaaaaatatgtggagtttttgaattattgtacaaaaatattaattgataattcagagtatgagatagcttataggattacagaagaatcattaaatttagctattatgactgataatataaagttaattgagaagtcatattattttaaaggtataattcttcagaaaatggacaaacatttggaagcggaaaaatatatgaatctatcattagattcgttgtttaaatttggtaccagagaagaaagaagaaatagatatgtagatatgggtaagctttattataagcttggacttacagcggattcgctaaaatactttaatcttgcattagctgttgataaaaaaatctaatttctcgtaaatatatatagaagggcgatattttgttaattcgattataatggattaacaaaatatcgccacttctatttttttatattcacaattaagcctttaagatcagtaatgatatatttaagctattaaattcatatggatattattgttactaattttttgaacaagagtcaatgaagtaatctaataaatcatctatattaataactcctacaattttttcgtcttcaataacaggcattgttataatatcattttctcttagacgcttagctacagtgagtagatcttcatcagattgcgcagagataactgattttgacataacccactcaactggacagctaacataatgtcctggatgtatcatgaatctatatatatcagcttttactaccattcctactacaatttctttatcatctactactggcattccattaatattaagtttgtccataaaatctaaagctttatctatagtatcgtttacattaattgtatggaaatttggtttaatgatagaacttattttcataacatcacctcttttaaaaaagtttaatatcgttaagctgtaaaataacaggctaataatatttatattactattttactataaaacaacaaaatttaaaataaatctttagatgataaaaaaattaaaaaaaagactaaataaactttgactttctttgacctatgtattattatatagataaagaggaattatttaggtatagtgataaactagttttaataataatttcgaaatttaacatagagatttaggaggaataagtatgaatattgataaaatgacgttgagagttcaacaagcattgaatgatgccaatgttacagctgttaaatttaatcatcagcaaatagatttaattcatcttttttcagctcttgtagagcaggaggacgggttagtccctaatattcttactaaaatgggtatatcagtaaagaatttaaaagcgtcagtaaataaggaattagatgcaatgccaaaagttttaggagaaggagttggcaatgtatatataactagaaaagtagaggaagtgttaattaaagctgaagaattttcgaaacagtttgaagattcatatgttagtgttgaacatttaatgcttgctattatagaaatagataacaatcaagtttctaaaatattaaagcaatataatataaccaaggacaatttcttaaaagttctttctgaagttagaggaagccaaagagttgaaacgcaagatccagaagggacatatgacgcattagcaaagtatggaactaatttagttgaccttgctaaaaagcataagttagatcctgttataggaagagatgaagaaataagaaggacaataaggattttatcaaggagaaccaagaataatccagtattaataggtgaacctggtgttggtaaaacagcaattattgaaggattagctgaaagaatagttagaggagatgttccagaaggccttaaggataaaattatatttgctttggatatgggatctttgattgccggagctaagtatagaggtgaatttgaagaaagattaaaagcggtattaaaagaagttcaaagcagtgagggtagaatattactattcatagatgaaattcatacaatagttggagctggtaagactgatggagcaatggatgctggtaatttgattaaaccattattagcaagaggagagttacattgtataggtgctacaacttttgatgaatatagaaaatatattgagaaagataaagccttagaaagaagattccaaccagtaattatagatgaacctacagtagaggatacaattgcaatactaagaggattaaaagaaaggtttgaaattcatcacgggattagaattcatgattcagcaatagtagctgctgcaaagctttctgacagatatattcaagatagatatatgcctgataaggcaattgatttaattgatgaagctggagctatgataagatctgaaatagattccctcccaacagaacttgatgttataagaagaaaaatatttaagttagaaatagaaaaagaagccttgtcaaaagagaaagatgagggttcaaaaaataggttagatgacttagagaaagagcttgcaggattaaaagaaaagaatgatgaaatgactgcaaaatataccaaagaaaaagagcaaatcacagctattaaaaccttaaaaagtgagctagatgatgctagaggagaaatagaagtagcgcaaagaaactttgattataataaagttgctgagattcaatatagtaggattcctgctatagaagaaaaaattaagcaaaaagaaattgaactaagagaaaattatgagggagctctattaaaagaggaagtaactgagcaggaagtatccgctgtactttctaaatggactggaattcctgtaactaacttacttgaaggagaaagggaaaaacttttaagactagaagatgatatgagtaatagagttataggccagggtgaggcaatagaagctgtaactaatgcaatactcagggcaagagctgggcttaaagatatcaatagaccaataggatcatttatattcttagggccaacaggagttggtaaaacggagcttgcaaaaacactagctagaaatttatttgattcagaagaaaatattattagaattgatatgtcggaatatatggagaagcattcagtgtctagattagttggagcgcctccaggatatgtaggttatgatgaaggtggtcagctaacagaagctgtaagaagaaaaccatatagcgtaattttatttgatgaaattgaaaaagcgcatgaagatgtgtttaatatattccttcaaatattagatgatggtagattaactgataataagggtaaaactgtagattttaaaaatactataataattatgacttcaaatatcggaagtgaatatttattagaaaatactaatgaagatcacgttgatgaagaaataaaatcaaaagtaatgagtgttttaaaatcaagatttaaaccagaatttttaaatagagtagatgatactataatgtttaaacctttgacagagtctggcattaagaaaattatagatatattcttaagagaagtaagtttaagactaaaagataaaaatatcgaaatagaagttacagataaagcaaaaacaataatggcaagagaaggttatgatgtggtttatggagcaaggccgttaaaaagatatatacagaacactttagagaatagactcgctaggatgataattaagggtgaactaggctatggatctaaggttgtgattgataataaagatgaagaaataataataaaaccactttagtaaaaaataagttttgtaaaattcctgtagataaatgtgatctataggaatttttattctctagaaaattataatcaaaaaaatgtgagtaactttttaagtagtaaataggaatcggtatatttgtattatataccatattttaattcttcataatagttttatatataaccaataattagaacaagaaaagaggcagcttttagcaagtgcctctttataatttatattctttaaaaaatattttattttacttgtttagagtttagttaaatttttttcttaattctaaatatagctacaattacagggactgatattacagcactcactatagcttcaggaactccatttgttaaaccaatggttgcaattgcaattccagcagtttgtggatttatctttaaaatagcagagtatctttctaagtaaaatacgtaagttaaacccaaaacacctatagtgttaattaatgtagcacagattgatgctattgcaatactaatgctttgatttttaaatctctttctaagaagtatatacacatagtatgctacaattccaattaggactctaggaactaatgcaattataggattccaaaatataaatgatgttggaccaggagcggtaaaattttgatacattgagaataaaccaaaaactaatccaactagggatccaactatggggccttcaactatcgcacctataataactgggatatgcattatagtagcttttacaggtggaattggtatgaacccaagcccggttaatcctaagaaaattgaaattgcagaaagcattccgatcattgcaatctgtctaactgaaaatttagatttagtatagcctctttccataaggtacctccgttcttattccttgatatatggatataattcggaaaaatatataatatatacgaatttccgttcagcttctaattgaataccgacacatattattttaccacgttagaaaaaatgttcaattatattttaaaaatataaatttaaatatagtaataataattactgattctatatttaattctatgaacttagaaaaaagttgatttttatacaaaatatgaataaatttacaaatctaatttatggatttaatccataaaaatttgaattataagaaataaaatgataatatataaccataacagaaattgaatagtataaaaggctaggggtgccaatttaattggctgagagaagcttatttgctttaactcttttgacctgatgtggctaataccaccgtagggaagcaataaatgttttagaagatttataagacttaccttagtgtaagtctttttattatctagtaatttattatggaagccaaataagtagaggttctgcccattggtcgtacaaattatgaaaaaagactgataagaaaataatgagtaaataatgaacagatatattaagttttaaaatttatttagattggggatattagtttgaaagttttagtaaatgaaagagaaatagatattgagggagaaattactgcatttgaagttagaagcaggataaaaagtgatgcggatatagttattttaaatggttttccaattaaacaagattattctctaaatgaaggcgataaagttactttaattaagagaggcgaggtgcctaaaaaagaagagttagaggcactaatggtaagtagacatactccaaaggttcatgagaaagttaagaaggcgaagatagctattgctggacttggtggacttggttcaacagtagcattagcgttgggaagagttggggttggacatataaaaataatagattttgatgtggttgaacctagtaatttaaacagacaacaatactttataagacatattggaatgaaaaaatgccatgcattaaaagaaatattgttagaaatcaatccgttcataaatatcgaagttgttgatacgtatgtagataaggataacattaaagatttatttgaggatatggatattgtaattgaagcatttgatggcgcagaaaataaagcgatgatagttagagaagttttacttcagacagaaaaaccaaaggttatttcagcctcaggtatggcagggtattattctaataatctaataattagcaaaaaaataaatacaaggctatatatgtgtggagactttaaaaatgaggcaaaagtaaatgaggggttaatggcacctagggttggtatcgcagcttgtcatgaagcaaatatggcgcttagattaatattaggagaagaggtataaactaaagatgtctgtaattggaataacaaatagaaaactttgtaggaacttttttgatcaaataaaaaaaatatcagaatctaatctagatttcttaattatacgagaaaaagatttaagcagtgaagagctaatgatattagttttgaaagtaaaagaggaactgaaaaatacaaatatcagaataatactaaattccaatatagatattgctaaaaagtccaatgttgatggaattcagttatcatttaatgattttataaatattagtaacaagttatgcacaggaagagcaataaattctaaagagatagtggataattttgattttagtgggaataaatataagatatataagatgataggcgtttcaatacatagttgcgaagaaggtatacaagcggctaaattaggagcagactatgttatttatggccatgtgtttgaaactgattgtaaaaaaggtcttcctcctagaggaattaaggaaatagaggctctttccaagaagattaacattccagtcattggaataggcggaataaatcaagataattataagaaagtattggatgctggagcaagtggaattgctataatgtctagtttgatgaaagacaaaaaccctgaagaactagtgaaatctctttctaaataaacattactttgatatatgaaaatcaaagtacgaatacgaataattaaaatcagctaatattaaaacctaaaaacacttgtaaatcttaagtgttcattataaactctttaaagaaagatatattcaagaacaattagtatctatgatctggatactattaagataataaggagaaatgaaataatgagtacaattgcaggaaaaggctgtccaagaattataccagatggagaaaaaaagccactagaagagattgaaaaagctataattaaaagctatagaaagcatatttggtcaaaatttgttaaggcaattaaagaatataatttaattcaagaaggagataaaattgctgttggaatttctggaggaaaagatagtatacttatggcaaaattatttcaggagttgcaaagacatggtcaagttaaatttgaattagtatttttagctatggatccagggtatcatccagatataaaaaatttactaatagaaaattgtgagcatctaaatattccaattcatatgtatgaatcaggcatttttgatgttgttgataaaatggctaaggattacccctgttatttatgcgcaaggatgagaagaggctctctttatgcaaaagcaaaagaatttggatgtaataaacttgcattaggacatcattataatgatgtaattgaaacaactatgctaaacattttatatggtggtaattttaagacaatgttgcctaaattaaaagctaaaaattttgaaggtttagaattaattaggcctatgtattttatagaggaagagtatataaaaagatttataaattatagtggtatatggccattgaattgcgcttgtatggttgcagctgaaagaataggtaataagagatatgaaataaaagatcttattaaagaattaaagaagaattttagcggagttgaaaagtctatctttaaagcagctgaaaatgttagtatggattcaatattaggttggcaaaagggcgaagaaaagcattcttttctagattattacgatgaagagtagacttaagtaactaaaagtatttattaatttggaaatgtatgttatgctataattaaccatatatcaatagatgaaaaggaagagtagatatggaaaataatcctatggggatcagtgatccaaacatattgttaagtgtaataaacatgaaattaagagatcaatatggttcattagatattctttgtgatgatttagaattatctaaagacgatattataaatatattaataagtatcggatataaatacgaggaagaagaaaatcaatttaagaattagagtcttaataaataattattcataaagttaggaaggtgatgttatatgaatttaaaaaagacaggcaaattaattactgttatagcagcaacagcagctttaatagcatcattagcaaatgataagaaatctaaagattctaacaaacaggaatagtacaaattatagaattatgtgaaggattgtatatatatgattagggaggaacttcaattaaatcatgaggaaatatttgattctataccaattttgggcgttaatataatttggaatcaatcagagcttaaattaataattgatgatacaatgaaaagtttttttgaagagtatgatactaagaatgaaactttagatcaatttataaattttgttggtgaagaagataaacaaaatgttttaagctttttctctcaagatttaaagagacactatataaatagagaacaaatgcagctacaatacaagatggaaagtcctaggggtaacattgttgagtttattcttgtcgggaagtcaattaaaagtaatgaacagtattactttactggaactagttattgctttaaggacttagagaatgaatatggtgatatagattctttgacgaaaaattggaaagaatctatggtcaataaaacaatagattcaataattcatagtgatagaattacagggctacctaataaatattttttcaagaacacggtagccaaaatgttacaaaatgttgttaatagtaatactagagccgcgatgctgataatagatttagataattttaaatatgtaaacgactcctacgggcatgattttggagacttagtgttaaaagaagtgggctataatatagtcgaatctgttacagaagatatattagtatcaagatatagcggcaatacttttctgttatttaagccaaatataattgatatacaagaaattataactttgggtaatgctatagcaaagtcttttgaaaaacctaatatagtgaatggaagaaaaatatacttaacagcaagtattggtgtttctctatctccagatcacggaatagattataatacattactcaaaaatgcagatgcagcaatgtatgaagcaaagaaaaatggtaaaaatgagtgtgatttttttgatgatagcctttctgatgagctaaacagagtttatagtttgcagaaagggttaagaactgcactgaataataatgaattatatgttatgtttcaacctaaagtatcactcgatgattctttggtaaacggatttgaagctttagcaagatgggaaagtcgtgaatttggaatggtaagtccggcggagtttattccgatcgcagaaagttcaaaaatgataattccaattggaagttttgttttggaagaagtattcaaaaagacgaaatgtcttttaaacgagggaaatgataattttaagatagcagttaatttgtctgaaatgcagctcagagaggatgttgttttatcagattttaaaaaactaataaagaaatataaaattcatccaaagtatatagaagtagaaataacagaaagtatgctaatgaaatcatttgatagaaacgttaagatccttcaggagataaaaaaattaggagtaagcattgctttagatgactttgggacgggatactcttcgcttaactatttgacaaaattacctatagatgtactaaagatagataggagttttgtaattgatttgatgaacaatcctaagagtaagtgtattgtggaaaatataataaatttatcacatcaattggggatagaagtagtggcagaaggggttgaagaaaaatcgcaagttgaatatttaagaacaatattatgcgatgttgttcaaggatactatttcagtaaaccaagaatgtttgacgcaattaagaatataatcggtaaggaaattttataaaagtgttgacaaacactatttgaggatataatataagattataaaataaatcctacgaagagggatagtaatcatataacaatgttaaagagagctgaaggtggtgagatttcagtacggtagttaatgatgaatgggcctttgaggagcgagatgaaatcttttgagagtagtttagccgtaagtcgcacgttatagcgaataagatatgtttgtatctgaaatgagaggcattttatgcaatctaggtggcaacgcggataatatccgtcctattaattataggacggtttttttatattcttttttagtagttgttaaccaaaagactctatatttggaagcataacaaagaaatatatttaaatattggggcgtgataagtatgttgtgaaagaaagtggtttcaacttaaaaataaaataagcaaagattaacaagggggatttttattatgaatacaaagaaaatggcaacaaatgcaattttaatagcaataggagcaatattacaccaggttacaccaccattcggtatgcaggcagatttctcattagcaatgttatttataataatagtgtttaataaagattataaaacaacattactatgtgggattattatgggagtatttgcagcactaacaactaaaacaccaggaggacaattaccaaatattatagataaatttataacttgtaatgtcatgtatttgatattaatgcctttaagaaataaagttaataagttagtgcaagtatcaatattattacctttaggaactttagtgagcggaacagtatttttaactttactagcgaatatagtaggattacctggaggattatcgtttaatgtacttttcatatcagtagtagtgccaacaataatagtaaatacaatatcaggaattgtaatgtttaaaattgttgaaaagattacatcggtaaatggaagctatgcggtagaatagatattttgtataatttaaagaggctatttcaaaaggattaattttgagatagcctctttattttatccattattattttttcatgaaatgatattcttcaggagtattttcatcgattgctttaaattcatagccattatctttataatatttaattatactaggtaaagcctttactgaatttttactcatatatgcacaatgcattaatagtactacacgctctttgtcacttttggaatttttaataaatgtacttggactagcattaggatgagcaccatcaccactatctgtattccaatcgtaaatttttaggttattttgatgaagtaaatcgaccatagactgcgaaattttataacagttattattacaaccaaaagggaatcttagtatatttggcttaataccaactatggaattaattatttgctgggtatccaacatctcttgcagaaattcttcattagagtgataaaggttgtttcgattatgactcatactatgaagaccgagcgcatgcccttcatcatacattcttttaattaaatcctcttgtcctttgatttgacttcctattaagaaaaaggttgcaggaatagattcttgtttcaatatatccaacacattagtagttacttttccagctgggccatcatcgaaagttagatatattatttttttttcatcagcaaggaccttatgaataagaagattttgataattaattatagttattataatcaaaacaaaaggaatgtatttctttagcgattttagattcatattatcaccttcctaaatgtttttacaaaaagtattatgtcctaaaattaaatttatattataagcctttatatacttttggttacaatataattaagaagatataattataaaaatatgaatttatgtgaaaaagtagataattaattgaattagatataatagtgttcagcgttatgctaaaatatggtataattttagatagattggtaaacttcaagttagtgaagaaaagggatgaattagaattgagaaatgtaaataataaatatctaatagagcatgagatagttattgaagagaatttttcaaattatattgttacagacatagagagagacgcaagatatgttctatgtattttgaaaaatggttttacatatgagaaaacaagagaatatttattgagtaaatttaagactattaaaaatcttaattttgagaacgttattaacattataaatattgaaataatttatagtattaatgggataaagcttgatactcctcaatatgggtatttaatggagtatgcagaggctaaactggatacacaagattattttaataaatgtgatttttgtaagaaattagatacatttatggatatttgtgctactataaatacgctaaacatgcagggatatatatatgatgatattagtatgaaggatgtaatattaattcctgattccaacaataatgtgaaagtcaaaatgaaagatttgttagcaaatgaattaagaaagtttaatttaataaattcattaccttaccaatataacatcgaaacaagagaagatataaattcaaataaagataatattgtacaagttgtagaactgtgcagacaaatattcacagaatcagaacttgaaacaggatttaaaggattagaagatataaaaaatatatataatcgagtgaatactataaataaatcgtttaaacttaaatattttatacaaaatataaacaaaaaaatgaagaagaactatagattatttattagtgaggctttaaataagattaaaacggatttagatataataggaatgacagaagaaataaaaatagtggaaaaaaattttcagaggatactggaaaacaagcagagaaataagtttataaatttcaatggtgaagatggaagcggaaaaaccagacttttagaagaaattaaatatagatttgaaaataaatactttagagatattatatatattgatgattttaataataaaaatgcgagcaacgaagagcaatataatacaatac

SEQ ID NO: 124 - DNA, 14931 bp, Clostridium beijerinckii
ttataaatatatagattctacataatataattcattttacatcgtgttatttggtttgcaatagctggtagtttaaactaaatttctatgaattaaaatcaaggagtatgtagacttttaattacaacttttctcaaatataaactatttatattgaacttttaatggaggtgggaaaataaaaaactttcgcataaaaaaataaagaggggttgatttaatgatttggtttaaaaatttaaaaatatcgcataaacttatttctacttttatttttatttcaattttggtatgtattgttggttttattggattatataatatgaatataattaataacaatgcaacttccatgcatgattataacttggcctcaataaataacttaactactttaaagcaaaatatttctgatatacgttcagatttgctaaaacttgcttatcaaagaaatgtcagcgaaaaagatacagtaaaaaaagacattaaagacttaattgacgagaataatgaccttataaaaatatatgaaagcactttaatctctgaatctgagaaacctgcattctcaaaccttaaagaaaactttaataaatatgttgatttatctaactcaataataaaatacgtagatgagaataattttagtgaagctgatgaaaattattctaaagttaccgaaaccagaaaaaatatatatttgagcatggatgaattaataaaaaataatgttaaccaagccgatgcttcttattctgaaaataactcaacttttaaaagatctttatacataacaatctcaataatacttattagtttactactagctgttattttaggtttatcaatttcatttatgatttcaaaacaagtaaaaagagttttaatctttgctgaagctattggtagtggtgatttaactaaaactataactgttgactctaaagacgaaataggtaatctttcaatggcattaaacaatgcaaaagaaaatatacagaatttaattgttgaaataatgaacagctcaagtgatataagcgccacaagcgaagaactttctgctactactgaagaaattgcttctaaaatggaaattgtgaatgaatccacagagcatatatctaaaggtgttcaagatttaagtgctactacagaagaagtaactgcatcaacagaagaaataagtagcgccataaattccattgctaaagatgcagaaaattcattagcatcagtaaatgaaataaaagaacgtgcttataatattagaaataaatcttcaaaaagtattgaagaaagtaatttaatttatgataaaaatcgtttaaacattttagaatcaattgaaaattctaaaatagtgtcagaagttagaataatggcaaattctattggaagtatagcagagcagacaaatttattggctctaaatgctgctattgaagccgctagagctggtgaacatggaaaaggttttgcagtagttgctgacgaagttagaaaacttgctgaacaatcttccaatgcagtttataatattcaaaccatggtatcacaagttgaagcttctgtggaaagtctatcaaaaagtggacaagatgttcttgaatttatggctgacaatgttaaacctaattatgaactccttatgaatacaggaattgaatatgaaaaggattctgaatttataagtaatattatagataaatctgccacttcttcaaaacaaatggatgaagttataatgcagataagcggtgcaatacaaaatgtatcttcagtagctcaagaatctgcctcaaatacagaagaaatattaaatagcattactgaagttacctttgctctttcggatgttacaaaatctgctcaaagccaagctgaactttcacaaaaacttaatgaaatgattcaaagatttaagatataatacaaaattaaaataatttatgaaaatttaaaattatctttgcaaatctcatataaaatgtaaaataaatttagaccttatttcatatactcactcaagatagctaaatcatgcttacttcataataggcctaagcccttaaattttcacaatgtttaaaatatttaaataagcttattttatcccttaagattttatgatatattttggcactaaaaaatacttagagttcgtatttctctaagtattttctgtttgcataattaatctaactaacttcatactttatcttcttaagttatacccttacacgtcttaaaagtcatccattatttatattaaagagatttcacataaatgttttttgaaagctcatttaattttttcatatctagtatatttatcttcttattttcacactttatgattccctgtgattccaattctttaaacgttctatttaaatgcctgtaagtcgttcctaaaaattcagcaatctctaaataagatgaatttaaaattatgtaactttcatctattatatgttccatcaaataactagataacctattaataagtggatacacaaaattatatgagctattattaatagttacataaagtttttcacttaaagactctactaaatgatgtaaaaactttgtattatcgaaatagttttctcttaatatatctgatggaattcctattaaataagtatcttctactgcaataatattgcaaagtataggaatgttttttaaaagttctaaatctcctacagtattaaaatctctataaaattttaatagcattgatttaccattttcaaaaggataaaacactttaattttcccatctacaattagataataatattcaagtttttcttctgacttcattatatattcttctttttcatagaaatgaagctgaaaatgttttagtatcgtgtcatcaaatatgctttgtatgttatgctttttaatataataatttaaaagtttattatctaaaatttttttcatagactctcctaacatgacttatgtcattttcaaattcctataaatatattattttattaacaggacattgtaaataaaattaaattttgatttttacaaatttatatacaactatacggaggacatattatgaactatgaagttatactatttgatgcagacgataccttatttgatttcaaaaaatctgaaagagaggctttcaaaaacactatactcgaatttaatatcaattacgatgaaaattaccacttaaaaatatatcacgatataaatactgctatatggaaagagtttgaacaaggcttaattactcaggaaaaactcaaggtagaaagatttaaaagacttgcggataaacttaaaatttcttttgatgagattgaatttgctaaatcatatatgaaaaacttgtctaactgctcctttttatttgatggcagcctagagcttgtagagcatttgattaaaaactataaactctcaataattactaatggtctcacagctgtacaagaaaatagaattagaaaatcaactatatcaaaatattttgaagatgtagtgatatctgaggaaatctccatctcaaaacctaatccagaaatatttggacatgctttaaaaaacatacgccacactaataaaaacacagtacttatggttggagatagtttaacttccgatatacagggtggaatcaatttcggtatagatacctgttggtacaatccaaataaacttgagaataattcaaatatatcacctaagtatgaaatttctacctttgaagagcttaatcatttactccttaattcttagaatttactagtatatttttaggacatgcttaatctttatgcacatgtaatatttaggattaggtcactacgacctaatcctaaatattataattcattctttataaataaatctaaagcaaaatgacaccaaactttcattatacgaaattctgtaattttctttaaaataaagaagactaacagaataattcaacttcaatctgttagtcttccagatctaaaatattatattaaatattgttattttccttaattcttacttgttgcattgttttcagatgattgatttacttgattatttgctgtgttttgactatctgaaatatttttattgtctgcaccaacaatatttatattttgaccagtagttaagtattttgagaatataaatgttaaagtagtaaaatcatattttttatctccaataataattgaatcttgcactaattttccacttccatcaaagtaataccacattccgttattcttcaaccaggaatttgatgccataactccatttgtccaaaaataataccaatttccattatactccatccattggtttgttattgaaccatcttccttaaaataataccagtctccattgatttgtttccatcctttagcttttacaccattctctacccaataagaatgtttatatttatcttgcttccaagtcgcagaagctgatactggaataatccctatcactgatatggccagtaatgatgatattattaacctttttaccattttatcgtcccctatccattcaattaataatattattatatcatattaatattacattttattctaattttttgcaattataatcaattcttaatttagtgttttataacttccatattaaaaatataactgcataaaaatccacttactatgtatataaaaaatttttttctactattgacggcttataccatgtcgtagtaaaattaaggcggaaaacaaaagctaaataaaaactttgttaggtgaggctcctatatagatacatgctgctgcccggaaacgtcgaaagacgccaatgggtcaacaggtattaccggattaaggttctacttaatgtagccgaaaaccatatggttttctatgctctatagtgctaaaactcaacgagtgaaggtgttaatacaacaaatgtactttgtgctactgcattccgtatatttgtataatgttgtgtttgattattgtgcccttcacttatggtgaagggcttttattattttttaaaggaggtgtatccagtggatgaccatgatacggaaagttgtaatatacatttttatttaaattcaagcaataatatttttagggcattaattggatacactctttatgccctgaattgaaagggtgaaaaacatggaaaaaataacaaatttctttgtaagtaaaattattcataaagaaattcataatatttctggccaaataattggtaaactaaatgaccttattcttgattttagtcaagaaaaaccaactgtagtatatatacaaattacaaattggaaaaaatctttttatctatctgctgatgcgctagatatattcaaagatgaaaaagaaaagtatcatattaaaattaatagcgagagccttacaataaagtttcctggtgaagatgatatttttttagtaagagatttcttagataaacaaatagtagacataaacggcaaaaaagtagaacgtgtaaatgatgtacgacttggaaatataaattccaaatggcagcttgttgccgttgatataggaactagaggattactcaggcgtcttggtgtagaatatccttttataatatttacagaagctttaaagtatagattaagaaacaagttaattatatgggatgatgtgcaaactttgtctactggggttaacaatctacaacttcaaatgccagcaagcaaaattgaaactctacacgcagcagatttagcagatataatcgaagatcttgataccaaaagcagagatatattgtttcacagcttaaacaatcaaaaagctgctgaagttctcgaggaaatcgaaactgatgttcaagtaaatttattaaaatctatgtctgatgaaaaagcttctgatatacttgagattatgccttctgatgaaatagctgatattttagaagagatggatgaagatagagttgaaaaactattaacacacatggacgaagaaagtcaggatgaaattagagagcttatggaatacgaaaaagaaactgtaggaagtattatgtcaaaagattttctaaccttcttacctgatgtaactgtaagtgatgtatttaagtggattcaaggaaatgcgcctgatgaagatgaaagttattatatatatataacaaatgataaagataatcttattggggttacttctttattctcacttattacttcaaaaccagatacaaaactttataatataatgacaactagacctgaaagtttaagggatacggatgaaatagaagatgctataggcttaatgcataagtataatcttgtttcaattcctgttattgacgaagataataatttagttggtgtagtatcattaaatgacagtatccatgaacattcacgcttaaggagggttgcactatgaagaaagtattatctggtagatttaaaaagctacttttcattatgactattattggcccaggattaattactgttaacgcaggaaatgatgctggtgggattacaacttatgcatccgttggtgcgtcttatggatataaaatgctatggggattacttttaatcactttcagtcttgcagttatacaggagatgaatgcaagaatggcggtggtaactggtaaaggtttgtctgatttaattagagaaaaattcggagttaagcttactttctttgcaatgaccattttactagttgccaatatgggtgttgtttttggtgattttgcaggaattgcagcaagcttagaattatttgatgtaagcaaatatatatctatccctattgtttctgtagtaatctggttacttgttaccaaaggttcatataaaaaagtagaaaatatcttcctattgtttactcttgtattttttacttatattatatcagcttttttaactaaacctgattggggacacgtaatgaaatcaatgatgacgcctaccattgaattaaatacaggttttcttcttacctttataggaatgattggtacaacaattacaccttatatgcagttttacctccaatcatcaatagtagataaaaaaatcagtatatctgagtataaatacgaaaaacttgatgtttatttaggcgctttctgggggaatgcagtagcatttttcataattgtatgtacagccgtaacactttataaagctggaataacaataactagtgcagaagaggctgcaatttctttaaaaccacttgctggtgaagctgcatttatactttttggtgctggactttttggtgcttcagttcttgctactgctgtcatcccactttctacgtcctatgcgatatgtgaagcttttggctgggaaagtggtgtggataatgattacaaggacgctccagctttctttggaatatatactggtataattgttcttggagcattatttatacttcttcctggaatatcgcttattcaaattatacttgtatcacagcaaattgctggtttgctatctcctataatattaacatttatgataattttaatcaatgataagcgtataatgggtgaatacgttaataataagactcaaaatattgtttcttgggctacagttatatttattataattctatcaataattttatttgtatcgcctcttatttcataattatatgaggctctagaaattcttatgaaataaaatatatgttataatctttattatttatatatatttataaataaaatggaacaaggtatgctttaaataatataccttgttccattttatttatcactataagtattactcatcttcctttgtctaattaactttatttattcgaaataatagtatatattctgtaattttgatccattgagcccagtctaaactatcgtagactgcaagttatatactcttataacgaataactcatacagatttatatagaattacttattaaataaaatatataatctatatgttttaactataaaagttaagtctactttttctcattcctacatttaatacaattcctaatgacataaaatttacaagtatagagcttcctccatagctcataaatggaagagtaattcctgcaattggcataattccaatagtcataccaatgttctgaaaaattgaaaataagaaaccagatgcagttccaacacaaatgagacgtccaataatatcttttgattcttttgcatgcttaatcattttatatattaaaatactatataaagctatgagaaaaagagccccaaaaaatccccattcctctccaactgcagaaaatataaaatcagtatggacctcaggaatgaagccaccggatgcacgaactccttttaaaaatccagagccaattaacccaccagctccaatacctgttatagactgcattaattgaaaaccagcattctgctgatatgattctggatccaagaataccaatattctctgtctttgatatggttttaatatatcactaaaccatataataagacttaatgggacaactgagaaaaagcctgctacaagaacctttaagtttaatccagaaatgaagtatattcctaacgtaataaagaaacaaataagagtcattcctaaattaggttgaattacaattagaaacattggaattaaggcataaaaagataagataagaaagttttttggattgttaatatcgccatctagatcatctaacttttttgcaaggattagtattaatccaaactttacaaattcaccaggttctatagctctatttccaatccttatccatgatgatgcaccttttactgctttgcttgttatatcattaaataataaaagtcctactcctgcccaataaattagttttgcataaccacctatagtattataatcaaatactaaaataaaatatacaattgctagtccaacaattagccacaacatttgcagttcagcataatagaatccaaactttatatgagttacactataaatgtttatgattccaaagattgtaataaaaatagctgtcacaaacatagtaatatctaattgttttaaaagcttgctattaatcaaatatttattcatgtaaaatttcctcctgaaaagtcgaaacaattagtttatatgataattatgtattaataaatagtaatattcaaccatttgtgccaaatcttaattttaatttaatacttgatatttcaatatataatcaaatttttaacctaaattctcacatttaaatttccaattattatatattgctaaactcatagatactctaattttataagtatactaacactaataaatatacacctaaattttttgtaacacacctactttcattatttcctattaaattttacatctaataatttcaaaattatggaacaaaatgactattagatcattataataaataagacatagctattcctattatacttttatttatactcccttttatttcaaaaaactctagtagtactgctagagtttttgatttaaataaaaaaatcgcaggcgactgtggaaccggagatttttttcacgcatctgccttttcgaacgcatgtgagaaaaatctgcacattagaaatagcagctctgctgcattcaagaacatttttgcaggcgaatatgatttatttttttattcttttataataattaaccctagtaaaatatactactataaagttatccacagatttaattgcattataatttcctaaagaataaaaaattcctactataagtattactatagtagaaattttaaatgtttcttttagttattttttaaaaaatcttttctttctggcgtaaatacatcataaacaatagaattatcttctagcacaatgcatccatggggaatatttgatggcatgaagattgtatcaccttctctaacaatctcgcttttatcaccaactataaatttaaaagaaccttttaacacatatgataactgatcatgtacatgagaatgagtctctacgttattagttacttttttaaaatgtacttctacagccatcatcttttcatcatgtactaatacctttcttttagtgttttcatctagaatctcaaattcaacatctttattaaaacaaaacattttacatatcctcccttacgttatagataaatctcatttaattattatgcagtcatattatttcaattagcaacgcaatgagtatgtttgtttacattcttaaaatagttgaacatttagcaaaacatactcattattctttaatatattactcacatataagttacaaaaatatatttataatctactaagctaatacattttttatatattctttgatctcatcgcatttacagttatcaaagaaatattctttaaaattagttccacttacagcaccttttaataaatcttgatctatattctttaagattgttaacatatctgtatgtgttacctttttaacttcatctagtatttttttatttctttgttctggtactactctatcctttggatatccttgaccactttcaccctcaaataatttttcaaatatgtattctaaatttaattcagctccccatccaaatcctttggcaaatggaagagaaattgcatttccatcatttatttgtgcaaacatgtatgcatcagatggatctactatatgaccgcataaaacacctgggaatgcattacatgcaagcattgcaccttcccctgttccacatcctgtaattatataatctgctgctcctgagtttaataatattgcagctaaaataccattttgaacatatgttaattgtgcttccccttctactccatacattccatagttaaatacttcatgaccttttggctctacaactttttttagcgactcatatataattgaattttttgctgcttgactgttctcatttattaatgctattttcatactatcgttcctttcctattgaggttgttttcctatataagctaagataccaccatctacatataaaatatgaccattaacaaagtctgatgcatcagatgctaagaatacagctggtcctgctaaatcttctgctgttccccaacgcgctgctggtgtctttgcaattataaattgatcaaatgggtgtttcgaaccatctggttgaacttctctaagtggtgctgtttgtggtgtagctatatatccaggccctataccattacattggatattatattctccatattcagaagcaatgttctttgttaacatctttaatccaccttttgctgctgcatatgctgaaactgtctctctacctaactcactcatcattgaacaaatgtttattatctttccgtgacctttttttatcattcctggtattactgctttagacacaataaatggtgcatttaaatctacatcaataaccttacggaagtcttctgctttcatttcaagcattggaatacgtctgattatacctgcattatttacaagaatatcaattactccaacttctttttcaattttttcaactaattcatttactttagcttcatctgttacatcacaaacatagccatgagcttttattcctgattctgtgtaagctgctagtcctttatctactaattcttgattaatatcgttaaatacaatagtagctcctgcttcagcataagattttgcgatactaaaccctataccataagaagcacctgttactaatgcaatttttccctttaatgaaaatccatccataattcccatagttaaaatcctcctctatgtgttacattttatatttacagtatatcactacatataatcaatttcttgttatatcctttcgaaaatattgcaaatcttgaaccatagatttataatgaatgcattatatattaggtactgatgtttttaaagtaaacttacactaaaaatgaaaggagaagttttatttatgaaagaagaaatttcttgtaaggcttccataaagaactgcttagaacaacgctatttctctattgcacgcctatataaagaagaaaaaacgatggacatacatatacatgattgttatgaaatatattactctatatccggtggaaagcaaatacttattcataataagctatatgatattagccctggggacttatttgtaattaatcaatatgaaagccatcacgtttccaaggttgatagggctcatgaacgaattgttatatcgattcatccagaatttcttaaatctatatcaagtgataaaacagatttaagttattgtttcacaaatcgtagtgagaatttcaatcataagatctctttaaataaagaacagcaacaacattttctttattttatcaataagataatagctactaatggatatggctctgacataattgaatatgcatcttttttagaactaattactttattaaatggaatttatattgcaaataataacttacatgttgacgatcactcttacaagtacaatcaacaagtccaggaaattataacatatataaatgaaaatattactgaacctattaccattgactatttagcaaatcacttttatttaagtccatcttatatatgtagaatatttaaatcagctactggaactactataaataaatatatttcagcacgaagaataaccatagctaagtcattgttagctaatggcacaaatgttaatgaggtttgtgaaaaatgtggttttaatgattatactaattttctaaaaacctttaaaaatgcagttggaatttcccctaaaaaatattcaacctttagcataagttaacgcttaaaatttttgtataactaccttaaatccataatatatttattagtaacattatctaattaactaaagtgaaatctttagcggaaacttagtttttgagtttatataaagcataatatgaaaataaagttatgcatttttaaattttgattagtttaacaattttaaaggagatatgattatgttactggaaaaaggctctaccggttcttacgttacttatctgcaatatgccttaaaaatcaaatgttgctattttgatatagttaatggggaattttcaactacaacatataattcagtgataaaataccaaaattcaaagagattaactgctaatggtgtggttgatgatactacttggactattttaaaaacagatattcaattaattcagcagcaacttaatagcaaaggctatgtcttaactgttgatggtattgctggcattaatacctataatacagtagtaaaattccaaagagaaaacggtcttgtggcggatggaatggttggatctagtacattagcaactttggttagtcaaacaccaagtacaacgccgtcttcaacatctgaacaaattgtttcaataaatcagcttaatgaagtgggttggaaaaatgtatccattaatcaaattaatgagctaaatagctgtttaaaaacatttgctataataacctttccaaggttaaggcattttataagccaatgcagttatgaatctgaatgtggactttacactaaagaagttgatcctggttataaatacgaaggtcgtgaggatttaggaaacatatatcctggagatggtccaaaatttaagggtgctggttatatacaaataactgggcgaagtaactaccaaagcttttcaaattatatgcgtgataaaaacattatggacggagttaactacgtagcagctaactatccttggatgagtgctggtttctggtggtatactaataatatgaattctctttgcgatagcagatcttctgttgaaactataacaagagctgttaatggtggattaaatggctttagtggcaggcaaaaatattatgatatttgtcttagagtttttaggagcgatgtctactaatttatattttttattacataataaggatatgcctcaaaataaatattccaaagcatatccttattactaatctaccattctctgcccttatcaccagacatattatttttagttccactaggatataatactgagtaatggtccaatttaggatcatttccagagtccttaaaaacaaataaaatcttaaactcgcttccagatttatagcctataattctttccccatttgatgtaacatcatgatctggctgaccaaaaaagtctttaacatctgaaagtgaaatttgttttagctgactgtcaaatgatctaacttcaaaaacttgatcacctttattagtaccaaagacaacattcttacttgaataagtagcataatttccttttgcttctcctacccaatctgatttatctgcttttccccactttttttctatatcctgtagagttgaagtttttactgggaaatcgcagttaataatctttccctcttcagataatttcttaatattatcaagaacagctttatgttcattgttttcagtatttgacgtctcaacattactattttctgaaggagcatctgactttgaatttttgtcttcactgctttcactagtttcactgctgtttttgccatcatttgctgcatcacctgaaggcttacttgaattcgagcatcctgccattatagttataaacaaggtcataacaattattactattgattttttattaaaaaataaactcatctcacttctttaggcatatcactatacgaatctataagttccttagcctaaatactcacttcctttccttttatataaatattttaacttagatttactaaaataccacaattatataatacccataattgatattattactcattaagaaatatggttactatactctaattttatcacttttatcatttaaatatgagcctgttaat

SEQ ID NO: 125 - DNA, 14916 bp, Clostridium beijerinckii
cggagtatcagtgtaaacccttcgggacgttactccgtcatttggtttctcataataacagttctaatttatgaatttaatcatttaattaggctattcttttcaaatagcaacaagtcgcactcttggtataaattggatcgccggccttgtctagagctttttgaacttcaatactgagagaaacagagtcaatagttttagttacagccatagttttaacctcctttatttcgttttcataaaggatatatgtataaattttagtcattacataaatagatgaaaattatttgttttcttatttaagaaaagaactaaaacaggttataggtattgaaagagtcaggctaaatatattgtgaaatgctataaagtttacaaaaacaggaggtactatcaatgtaaatatcatctgcaatgaaagcaaaataaaaatatcagtagaggatacaggaataggaatacctttatgtatgcagagcagaatatttgatacatttacacaggttgatcaagtatatagaagaaaagctgaaggcagcggaataggcttggatcttgtaaaatccttcgtagaaatgcatggaggaaaagtggttgtcgaaagtagttatggaaagggaagcattttatattcttaatcagtcaagagtaaaaactattgactgatttttttgcataattttcgatgaaaaatttaatggttataattcgacttgatgtatatttgttttgtaattaaggaaagtgatattataaaaaatgctttaaaatgctaaatgttgtgaaaataaatagagggattttttgaaatatgtagaattatataataaaacatatggatataagaggtggttttgatgaattttgagtggtatgaaagattgtctatttgtcttaaaagcatatgtaaatcatttaatcgtataaatttattagtttcttctatgaaataaggaaaatgtaaagatgagattagtagaaatatctatgcgtagttggattgttaatttaaattttaaaattgcaataaaaatcagcaaagtatgaatggagtgattatttatgtttaaaaggattaataatttaaaaatagcatcaaaattagttttattatttacatttgtatctatatttacaggtatagttgggtttttagggatacacaatatggacaaattaaataataatactaaattgatgtatgaatataattttaaatctatacagacactggatgaaataaaacaaaactatttaatcattcgtggagatctaactgcattagcatataatgatgaaatggatataagtcaaaaaaatattactgttaaagaggtgcaaactttattagataataattcaaaacttttagaaagttacaagaatgaattgattgcagaacatgaaaaagatacgtttaccaaaatagaaaattcagcaaaagattattcgtatgtagctaagaaaatatatacttttgctttagatggaaataataaatcttcaatgggagaaatttcaaaaggggctgctataagagaaaatcttttcaaatcattagatgaaataatttctatgaatattaatgaagcaagcactaattcgcaaaataatataataacttataatagttcaaagattatagttattgtaattactatattcatatttattgcttctataattattggaatgttattatctatatctatttcaaaggaattgagaaaaataattgatttttcaaaagctctaggtgaaggagacttaacaaaggaaatagatattaaatataatgatgaaattggtgaagttgcaaatgcattgaacaaatccaaagaaaatataaaggtattaatatctcaaatggtaggtagttcaggtgatattagcgctgctagtgaagaattgtcagctactgctgaagaagtttcttcaaaaatgcaaatggtcaatgattctactgaacaaataactaaaggagttcaggacttaagtgcaacaactgaagaagttagtgcatcagcagaagaaatagcaaatgcaactagcgaattaaataataaggcaaataaaagctttaaatctgcaagcgaaataaagaaaagggcagaagaaataaaacaaaaagcaatacaaaatattgaagatggaaataagatttatgaagaaaataaaatgaatattcttaaagctattgatgaaggaaaaatagttcaagatgttaagataatggcagattccataggagagatagcagctcaaactaatttacttgcattaaatgcggctatagaagctgcaagagcaggagaaatgggaaaaggatttgctgtagttgcagatgaggtacgaagccttgcagaacaatcatcaaacgcagtagctagcattcaaggaatggttcatagggttcaaaatgcttttgataatctatcagaaagtggacaagaagttttagactacattgaaaacagtgttaaaccaagttatgaattgttaaaaaatacagggattcaatatgaaaaagatgcggaatttgtaaatgatatagcaagtgatattgcaagttcatcagaacaaatgaaagaagttataaatcaaataaattttgcgttagaaagtttgtctgcaacagcggtagaatcagctactagttctgaagagatattagttagtattaatgaagtaacattagcaattgaagaagtagccaaatcatctcaaagtcaagcagaaacagctgagacattaggtgaactatctcaaaaatttagtatttaacatattggttgaaggaggctaaaatatgattttaaattgggacaactctttatctgtaggagatgataatattgataatcaacacaaagagctattttatcgtttgaataaattattagaggctatgaaagaaggaaaaggtaaaagtgaagttattaatactttggattttcttgaagtatatgtaattaaacattttaattatgaagaggaaattcaaaagaaaaataagtatcctaaattcaatgttcagcataaacaacatggagagtttaaaaatgaacttaaagaattaagaagagtttttgaaactacagggatatcatcattgttcgtaattaatactcagcaaaagatggttaaatggtgtaaagatcatataatgaattcagatatggaactaggagaatatttgacaaaaaaactaaagaaagcattttgaaatcctttctttagtggaaatatctatctttgaatcattttgaataagggggggactttgtaaaggaggctctaaaatgagttataaaaaagttaaagccaatattagtatctttactacagttttattttttataatgattagcataaatgcgttagcaaatattctaccaattaatggaatgactaccggtaatgtatctgactcatataaaaatctttttgcaccagcaggactaacatttattatatggggtggaatatattttctacttgcaggatatataatttatcaacttggcttttttaaagaagaaaaaactatgattaatgaagacgcatttgaaaaagttagaatttatttctgtatttcatctatagcaaatgcaatgtggattatatcatggcattacaatattattatattgtcaatgatactaatgattgttattcttgtaagcttagtcttaattataaagactgttaaaaatgaagaactgtcattaagagaaaagctttttttaaaacttccttttagcatttactatggatggattacaattgctaatgcagttgtacttatggttagtttaggattaaggaacattggaatgtcagagatttatactagcattataatagtacttggagttttcttaggtattcgaataatgttaaaaaataaagatattgcatatggacttgttataatttgggcgtatataggaatattaataaaacatacagcacaagatggcttcggaggacaatatcatttaattataaattctgtaataatatctttagttttattagccttaattgaagtatatttgatattaaaaaggttgtgaccaaatatttttataaatttcatatttaatagaagctgagaatccttaaaattttaagattctcagcttttttattaatgtgttttaaatcaatatcactcatccctttaatctaatccacaattatatttatataattattgcgagtcttatgatttaacatgattatgtaaactcttccttaaattcagtgattgtatataatactttttactaaatagaattaagaaactttatttctaaatatgtgcataattaagatgattaatttagtggaaaaataattattaattttatagatatcacttagtacaaataattttatttattgatgagaataataagtttatatagcagtgaaagagaggattagaaatgagagtattaaagagagtattagctgttttaggaattgtaattattgtattttcaataacatcagtacatgatactaaaaatgttaatgctcagataaatgggatacgacaaaattatataaaaatagatgtactattatataattctaatgataaatttatttctttagttcgtcaaaacttagaagagattcagaagcaaaataaaggaaaagtagaatttgaattttttgatggaaaaggaaatcaagcagtacaaaatgaaactattagtcaaatatttaatagtagggtagatattttactggtaaatttagttgattcacaagcaacacaagatattatagataaatttaggtacaaaaacattcctataattttttttaatcgtgagccattacaagtagatgcaattaaatcctatggtaaagcttattatgtaggaacaaatgctaaagaggcaggtaaattacaaggggaaattattagtgattcttggaacaagaatagagaaattatagataaaaataaaaatggcatgctagaatatgttatattaaaaggtcagcataataatatagaatctaatgaaagaactgatgcagctatttctgcaattaataatgctggaataaaaacaaaggaacttgcagtcaaagttgctaattgggatgtagatttaggcagaataactgctgattcactattcttaaattttggcaataaaattgaagcaataatatcaaataatgatgccatggcaattggtgcaattgaagcaattcaaaaatatggatttaataaaggagatgaatcaaaatatatagcagtttttggaatagatgcgctaccagaagcgaaagaattgattaagcagggtgttatggctggtactgttattcaagatcctttgaatatggcacaagctatttatgcaataggaatgaacgtatttcaaggcgacgaaccactttataatacgcaatatatgtttgatgacacaaaaatagctgttagattaccatataagaagtatattggttaatattgaataagaaagctattattgaatagtacgatatttgctttactattggaatttgaaactatacttaaaagaaaatcattaaactccttgcctaatgaaaaataatcatggcatttgggtcttgctatttttttcatgtgccttatttttctttaatatgatattatttaataattcatttttgggttcttctactaattattatagaggcaattacacttattacaagaattagtataataacagaaatagaaatccctatagatatatgatacttaaatgatattccaagttttataccagtaaatataagtattaaggctactccatatttaacatattcgaagttgctatgtagtttttctaaaagaaaatataaatttctaagacctaatattgcaaaaatatttgatgtatatacgatgaaaacattagttgttattgcaaatattgcaggaattgaatcaatagcaaatagtaaatctgatccttcaattaaaaataatatggcaaataatggtgttgcatgaagaacattgtttattttcacaaaaaacttttcgtcatgaagttctttagttacaggtatcattttttttagaagtttaattaatttactattttcaaatgatacatcatcttctttgttaatcatcatttttataccacttataataagaagtataccaaatatatatataatccatttaaatgcattaataattgcaattcctaataaaacaaatatgaatcttaaaataatcgcaccaaaaattccataagttaaaattcttttttgatgtttagcagtaattccaaagctcgagaaaattaataaaaagagaaaaagattatcgacactaagacttaattcaataatatatcctccgagaaattctaaagctctttcagaacccatgtaataccatatggctaaattaaatatagcggctataaatgtaattaataaaaacttaaataaatgttttccagtagacatttttgtagctcctttcagataaatttatatttaaattatatatattttttaatatattcgaaattttatgtaaaaacaatattgatacaagtttgtttttgtatgaattataatgattttaaaaaagtgattaaaaaacttgcttataataatataacaattatgtaagaataaatcaataaaagtttatcatgttaagatttctataatattgacaagttttttatttaatagtaatattattaataacaatactaaaaagacagtgataatctcatttatagggggagtaactgcctgttgattataacaggattcaaagtcgtcattacggagagatcccggctttgaaagcaaaaaatgcttagtgagactctatagttagaacgtgttctagctatagagtttttttgttacataaatttctgaattgagaaaaaattgtcaaaatattttagtaattaagtaaaaggaggaaaacaaaatgaatagttttggaaatcaaattaaaactttgcttctgatgagtgtcctgacgatattagtagtattaataggaataggtattggaggtcaatcagggatgctgatggctttggtgctcgcattagttatgaatggaggaagttattggtttagtgataaaattgcactatctatgactggagctaagccgttaacaagaaatgataatattgaaatttataatatggtggaaagattgacagcaaatgcaggaataccaatgccaaggctttatattacaccttctactcagcctaatgcgtttgcaacaggaagaaatcctaagcattcagctgttgcagttacacaaggactattgaatatactaaattatgaagaattagaaggtgttattgctcatgaactggcacatattaagaatagggacgtgcttataagtactattgcagctgtaatggcaggagtaatcacaacaatggctaattgggcgcaatgggcgttaatgtttggcaggggtaacagtgatgaagaagaaggctcaggattcctagcagctttaccattaattattttaggacctattgctgctatgttagtacagatggcagtatcaagatctagagaatatcttgctgacagtacaggagcgaggattgcaggacatagcagaggactctctaaagcattacttaagttagatcaggcttcaagagtggttcctatggacgtaaatcccgcagcaagtcatatgtttatagtcaatcctctaagtgcgaaaagattaatgaacctatttagcactcatccaactatagaagatagagtacgtagacttcaaaattcaaatttatagtcttgtttataatttttcaagaaaaatcaaccttgcataggtagagtaataaataaattctatttttgttattatttttgaaggctatagcttgaaattatggttaatatatttctgtaaagaaatatagtcaaaaggaggaataataatatggcatcaagtagcagtggaagaaatacaactttaataccagaagcaaaacaaggattacaaagattaaaaactgaagtggcttcagaaattggattaagtgattatgaaaacattgataaaggaaacctttcttcaagagacaatggtagaattggtggagaaatggtgaaaagaatgatagaaagctacgaacaagagctttaaataatagtgaatgcaccaaatctgtttttggtgcatttatagcctatggctagatctaggtatattttatagactttgtttgttaaataatttaaatagatatactaaataaatattaacttcattatacattttaattttatcctttctgaatagaacttaatataacacctatgatgacaataactcctcctaatatctgtatggtggatacactttcatgtaagattaatattgaaaatatcaaacctaaaacaggaactagattcataagagacactgaaatactagaggagagttttctaagtcctaaattatataatagaaatgcaacaatagagcagcctacacttagatagatcaatgcgcttgctgaagtgatggtaggcattctacatgttttaccctcgatgatgacaaatggcaaaaagaagatgaagcctgctagcatctgataatatgttaacgtcattgcagaatatttatttgtcaaatctctcgtaataaagttgtagaatgcccatacaattcccgctcctattagaattatatttcctaacatagatttagaattcccatctacattaatttgagttagaactgcaacaccgatgatagcgagtataattccaagtaccttttttatatttggctttgaatgatagataaaaaattctagtaatgttgtaacagcaggaaaagaagctactatcaaagcagaatttgaagaagatgtcatactaaccccaatgttttctattgcaaaataaagtgtaatccccaaaaatccacttaatgcaatacgcatacgatcttccttttgtatttgttcattatttgatgtaattttcctcatgaaccaaaagagaatcacagcaaaaagagttctaactgcagcgagttgaataggagcaaaagtttcataagctaattttgttgcaataaaagatgcactccataatacaacagccccagtactagccaagtaatagtaagataaagttccattttgtatatttgttttttgattatctagtaatgatttggcatttaacatagaaatatatatcccccttttaatttagtgactactattgtaactacttgtgattacaatatcagttttagttgattgtgtcaatagatttagttataatattagttactaaagtagcgactaatattattggaggatttatggaagataacattttagaagtattaaaaaatttaaattttacagaatatgaagcaaaagcataccttacattattagaagaatcaccattaacaggctatgcagtagcaaaaaattcaggtgtgccacgttcaaaaatatatgaggttttagatagtcttgctatgcgtggagatattttaattagccatggaaatacacaacagtatgttccaattccagcaaaagaacttattaaaaatcgtcgggtaaaagctgaagagaattttaaacttgcagaaaaatctttagaacaatataatcaatcttcgaagaatcgtgagaatatctggaatataactggtcatgacgaaatacttgataaagtaaaagaatgcatcctctcagcaaaacatagaattttgcttgaactttggaaagaggaattcaaggaattagaatctgaattgaaaaaggcagctgataaaggagttatggtaaccattattgcttatggagaaatagtaactgattttgcaaatgtttacttacatgatatgagtacagaaattaccgatgaatacggagggcgttggattgtagctagtgccgataattcagaagttgtagctggtattgtatcactaggtaaagatagcagggcagcgtggacaatgcataaaggattggttatgcctataacagaagtaattattcatgatctgtatattatggaaatcatggagaagcatagagaattattagaagaaagttttggcaaaaatcttattgaacttcgtaagaaattttctatataccaagatttaaaaaaacattatgtataattaatctatgaaatcataatagtttattttaaaaactaggtcggaaaaatagaaaaaacactaacgattaagatacctaaatgctggtgctttctaacttgatgacctataggagaatcgaactcctgaatggtattttaatacttttgatactatgccaagtgagttatatgatgctacaatgctctatgggtgtgaagcaaatattcttgatgaaagcggtaatatagatttgtcaattgaaaagcaagaaaagcttgatattattataggaagtctacatgatccagttgtagaaataggaaagagtcttgaaatttatacaaagatgtttttaaaagcaatggataatccaaacctacatattttaggtcatataggaaatccaaagttgcctatatatgaataggagattgtaaaaaaaggcaaaagataagaatatattaatagaaataattaataaatcattttcggtaaagagaaaatgatgtgatgtgatttgcaaaaagattgcattgctttgcaaagaattaagaagaaaatgccaatataattttttgactatcttggtattttgtaaaaattaatgatagtaatggaaaaagtttggattagtaaaaataagtttatgatataattaggtaaatttataaaaaatcaagataatagatgaaatattttagcgaaagttataaactataaataagcgtataattttcgctgattttttgtttaaataagttataaggggaatgattttaatgataaaagggataaagctaaaagtattgctgccattaatatcaataagtttgttttttatagtgtttatggcaatacaatttaactctacaagtaataatttaaaaaaggtacgggaaatgaataataagtatttttatacaagcactaaagcagatgaactaaaattagatgttgtacaagtccagcaattccttacagatattagcgcgacaagaggcgcaaaaggttttgatgatggttttgatgaagcagaaaaatttgctaaggatctagaaagtgttttgagtgatcttaaagaaaaaaatccagaaagtgcaaatgaattagataatatacaaaaaagttttgaaccttattatgaaacaggaaagaaaatggcgcaagcttacatagacggtgggcctgaaaaaggaaatttatctatggaagaatttgattctacttcagaaaagattaatgaggaagttgataaatttaacgaagcagcagcaaaaaacatcgaaatatctataagtagtatagaaaatgatataagaaatacaataattttaatgggaatatctgttctagccttggtaataatatttgttataacttggagatatatatctaaaaatattgttacaccaataactactatgctttcaaaactcaatgaaatgtctaataatggcggagatttaactcaaaggattgattttcatagcaatgatgagattggtgaaatggcaaaaagttttaatttaatgcaggagtcttttaggcagattatcaatgtcgttattaatgaatcaagaaatgttgaaaataaagttgaaaaaactaatgaaaatataggtaagttatctggattaatcgaaaatgtttatactacaacagaagaattatcaagtggtatggaggagacagcagcgtcaacagaagaaatgggcaatactacatatttaattaactcagatatgatgggaattgcacaaaaggcaaaaagtgaagctgagaattcgaagcttataaatgagagagctaatgaacttaaaaataaagctgttaattctatggaaaatgctcaaaagattaatttacaaactcaaagtaaattattagaagctattgaaaaagctaaagaagtagaaaagataaaggccttatcagaagctattttagaaattgcctctcaaacaaatttattagcattaaatgcatcaatagaggctcaaagagcaggtgaagcaggcaaaggtttttcagtagtagcagaagaaattagaaatcttgcagaagattctaaaaaaactgtatcagaaataagtaatattagtaatattgttatggaaatagtagacaacttagtttctacttctcaagatatgataaaatttattaatgttgatgtgataaatgattatgagatgattgttaaaacaggagagcagtacagtaaggatgcagctatggtttatgatatgacaacagaatttagcaataaatctaacagtattatggattctatgcttagagttgcggatgcagtaaaacaaataaatgattcaaatactgaattagctgatggaaccaataatattgcagaaaatatgaatactatatctgaaagttcaggaaatgttgttgaattaattaaggaagttaatgtaagcactaataagctagttaatatggttaataattttaaggtatagctatgattattaaaaagaaataagtgcataaagaaaaaacaaatgaatttaggcggtttttaaaaatatttcttgatagtaaattgttgtgttataatcaaagttttcaaggaagaatataagaaggaggaagagttatgtcaaataacgtaaaacagagaagaataattttagatttagcaactactttagatggctttattgaagggaaaaacggagaagttgattggtgcattatggacgctgatatgggattcactaatttcttaaatgaaattgacactattttatatggtagaaagagttacgatttatggggacaatatattccacaagatgaagattcagatgatgaaaaagaagtttggaaattaattcatagtaaagagaaatacgtgttttccagaacacaaatagctactaataatcaagcaatatttataaatgaaaatattcttgaagaagtaaataaattgaagaataagcctggtaaagacatttggctatatggaggagcaagtctaattacaacctttataaatttagggcttgttgatgaatttagattatctattcaccctgttattttgggagaaggaaaaccgttgtttaatgatataaaacagagagtgaatttaaaaatggtcaacaccagaacgttctcttctggcgttgtacaattaatttatcattggaatggtaattaatttttaacagaactctctgtatcaacagctactccaagcttagctgatattatggtatttaatttattaattgaactagataagctaacaatttgtttctctaaacgaattagcaaataggcagataccgccactggaaacccattattaacaataaggttaattaactcatttacttccataaatccatcacctcctataatggatatatgatataaaacgtattatttcatgttaggaaacaaatagtacataaaactaaaatatatacatcgcataaataattcttcatgataattctaaaaatattgcaagaattttagctaaatgccagggatgtagcctaaaatgcatttgcgatagaatagatcaagttattgaagattatgtggagaaaactacagagatcgtaaatgattttagttttgaataggtaaatgaaatattggtattataataaagataacagctctaaggattaaccttagagctgttagacttttatgcttaataatacaatgaaatattattaaggattttcattaaaatgtttttctttttttgaatagcagtagagtagcacatatttttaaaataggcatattcctttacagtgtaatttttgtagaatacaaaatctataagttcaacttcctctttatttaaattctcaagggctaattttaaatcctcatagtcgcacatctcacataatgaagtttcagttgaaatctcaagttctggaaaattattttctacatcatcatgtaagcttaatgcatcactaccttcagtagatcttctggttctagttctttttattagatcattcatattatttttaatggcattagtagcataggcaacgaatctatgcttttctaaattgtacctggaaacagatttaaaaagtgaatggtaacattcctgtataatatcgtggaaattatacctatcaatgaaagtccttttagaaatattgtaaatcaaaggcctaaattcataagctaatttttcttttgcttcttcatcattattcttacatctggtaactaaagtttcaacataatcaaaatccatataaacctccatcttcaatataagagttatgaataaaagtaattattttacatatattgtgttttgtgttaaatttacctctacatatagtatatatggttaagttacatataacttatatagaaaagtaatattgagaaaaaattttttctttaaacatctcttttgggattgatgacttctactataataaagttatagtggtggtctttttgtttttggtggattttcacaataaatatatatcatgtaaagcaatagacaattattttattattccaatagaaaatagatttttaaaacataacttaatagataattgcgaaactcattgataaaaatgaataatgattgatttgaagttgcaaaaacattattaatggatttaatggttcctgctatacaaatataatagttgacttcttaaaaaagggcgcac

SEQ ID NO: 126 - DNA, 14792 bp, Clostridium beijerinckii
aatttgtaagaaaattgcttaaaaaaagtcttaaggtcgaagtctatatatctattaacttatttttgaaaaatatcaaaaataagttaataatttaaagtaaaaatttggttaatcaacacttgtggaaaattgtaatgaagttaagagtgtggaaaagttacacagaaatctattcaacaagattgaaaatgactggcaagtgcaaaataaatccattttgcttgtggaacttttatcacatctattttaaatataaatacaatcaaataatatgagaataattatcagacttatgtgaattggatgggtattatggtataatttagagtagaagtaaattgcttattagtttttgatatttatgtaaaaataagtggataagcttagtagtttatagaatggttatagaattaggtattgggattaaacatgataacttttatatcttaaaggacgaagggaaggataaatacaatgtttaagaaaatgaaaatatcccaaaaattaataggaagtagtgtgatatgtactgtattcttagttttagtcggcatagctggtctatttagcatgaacaaactaaatataaatacagataaaatttataataataatttaatgagacttcagaagttatatgtagtaaaaagtaatactaacttaggactatctgatatggaacatattattaatagtaattttaaaaatgatatagatgaggcacaaaaagatttagcagatttatctgatttaaataataaaacttttgaagaaattgaaaaaataccttattctagtgaaaaagaagaagctgattataaaaaagttaaagatgcgttaattaggtatagggatataagaacaaagataataaaggaggtaactgacaataattatgagggagctattgcactatataattcggagtatgttactttaagagaagaaatagctgatgatataaatgttataataaatgaaaatattgatgcggccaaagaaacatcggaatcaagtaacgcagtttttaaaaattcgtttaaatttcttgcaatatttattgttatttcagcattgatattagccatattaagtggtggattagcaatttggttaagaaagagaataaacagcatagttaattttgctaatggtttagcggaaggagatcttactgagaaaataaatataaatgcatatgatgaaataggtaatatgtcaaaagcattgaatattgctgtattagacgtgaaaaatcttattatggaacttactaatcgtatgaaaaatgtcagaatttcaaatgaagatctaacttcaacaatggaagaaatgtctgcaactatgaataatattaaaactgtaactcatgaaattgctgatgcaagcatgaatttaagtgcggcaactcaagatgttagttcatatacaatggaaatagaaaagctgacagatgaccttagcagaaatgctgaaaagagagaattagattcagatgaaattatgaagagagcggtaaatgtaaaagaaaaagcagaagcatcatctaataatgcaataagcctatataatgaaaaagaaattaagattaaaaaagcaattgaggatataaagatagttaaagaaatagaaaaaatggcagaagctattggtcaaatagctgaacaaactaatcttctagcacttaacgcatccatagaggctgctaatgcaggggatgcaggtcgaggatttgctgtagttgcagaggaagttagaaaattagctgagaagtcatcagaaacagttatagatataaagaaaaatataggtacagttggaagtgttattgaaaactttactaataatactaaagatatattgagatttattgatagtcaggttagaccagattacgaaatgttgaagtctataggaaatcaatatgaaaaagatgctgaagttgtgaatgaaatgtcaaaagagattgctgagtcagcaattaaaattgcagataatgtatctaaagtcaataatgctatagtaaatatttcgtcaaaatcacagcaatcagcttctagtgtagaagagatatttgcaagtatcagcgaaactagcgcctcagtagataatgttactaatcaggcaaaagacacatcagagatggctgatagcatgatagaaatggcaaataaatttaaagtctagaaatatataagttctgaataatatatagaattgttttatccaggcgctttgaaaaaatataaggaattaaaatttttagaatatatgcagggccaaatattcattttagtagaatgtttatttggctttgttttattctttggaaatttatattccagtaaaatctatggctcaacagtcgcctgcgatttttgtataaatattaatatagaatattttatttttagtgattatataatttattgcgatatataacaagtgaagtttgttacataatgtaacaattgatacagcaaatgtattttttcagagttatacttataaaaaagtaagggggagtataatttggaaaaaataatagaaatagagaaaatgatttgtaaaatgagacaatccttatatgaaattataaacaatgaaaaaagtttattaggaatagaagttattactgctagtcaaaggttagacgacataataaatcaatacaacgagctactcgataaagggatttaaagaaattcatatcactaatatagaagtcttaaataatataattcattttatatatatgaaaaaaatatgcattagacctatatgataatagatagaaagtagaaacatttttatttcgctggactatggaaagtatgattcatctttatataattaaattttatggaagaaatttacatattgctgtataattagatatgtataaggagggaatcttatgaatactatagaaaaagtcataatgaatcttaagataagaccagatggcatgaatttgtatgaattggatagaatatgtttcacaacttatcaaaagactctgctcggctcaaaacttggaagagtaaaggaacgtatagagcccactctaagatatttagaggaaactaatcaaataacgattaaagatggaattgtcaaattaaaaaaaactgataaagtttagtatattcaaataaatatatttatttgaataagttgatatttatatagataatataatgataaactatacttagactatgaaatatattccaaccagaaatgagtaatatacttttgtggaatgtttcattggtaattttaatggatgtgattctttggctataagttgttccaaatgtgctagttcaaagcttgttctttgaggctagcactttgggtgcaactttatagccttagaatcaccaatcataattaccgagaaactggaacaaaagtatattattcatttcggtgagctatacgcataagtatggattatagttggtttatctataaatctttagtgtttaagattaataataggcagtggaggattagaaatgataagaatacttttgtgctgtggagggggcttttcatcaagtaccctagccagtaaggttgaaaaggagatattagagaataatatgcaaaatgattattcaattgaattttctccatttttattagtaaataagagaatgaatgaatttgatataattgtatgttgtccccatctaataatgcaagttaagaaatttgtgaaaacttcaaagattgataaacctatctatatccttccaccgagaatgtatggtctcattagttttaaggaattagcaatagatgtagtagatgcaatcaatctgtataatgaaactaaaattaatccagtatattttccaggggaagaaaacaccatgatggttactaggcatgtggcttacagaaatagcaaagtttaataaatctttgtatataagttataaagaatatagttcatcttttataaaattatcgtacttcaattattttataatttatgatgtagtcttcagtgagctgaatttttaaaatcctatatataaaattctttaaattatagaaaatgtggtcttaaaattcacatattataacatagtaaagaagagataccttcaaatttgtgaaagcatctcttctttaatgaaattattgtacggaagtatcagttgttgtagttgttgatgtatttttcttttgatgagcttcttttttagcttcagatgctgctttaattttagcttgagcatctttaaatgataatcctgttatatcgattcctaatttctcagctcttgcactttgaattttagctattacatcttcatttgatagacctgtaacatctattccaagtttagaagcctctgcttgatttaattttattctagcatctttattagataaacctgttatatcaactccaagttttgttgctttcttagttaaattggcaaggcttttagcttcaagagctgctttaattttagctgaagcatctttatttgatagtcctgttatatcaattccaagtttccctgcctctgcagatagaatcttagctctagcgttatcaggtgaaagatttgttatatctatacctaattcagttgcttttttattaagtctttcaagagtcttttcctcaaaagctgctttaattttagctgaagcatctttatctgatagacctgttatatcaatcccaagtttttgagctacagcagctcttatttttgatcttgcttgatcattagttaatccagtaatatctattccaagtttagaagctttttgagtaagttttgcaagtttatctgccttattattttgcgatacttgtcctgtagtaacactatttgttacatttggtgtagaagcatcatcagcgaatgctggaacaaggcttgatattgagatcatagctgctattgcaattcctagtatttttttctttttcataattatctctccttacgtcatataaaaatttatttttatgttaaaaacatagattaatatagaaataaccggctataagggaattataattctgtaatgtgaaatttatgtgaaaaggaatgttaatcatataaatttattagcgccggatttatatatttattgcaaaaatgataatactatatactagaatgaaagttctagacaaatttataattaatctaatcaatataataatataaataaagttatattggggcttaaatggaaggagaaaaataatgaacgaagtaatacaaagtatcataacaagaagaagtataagagtgtataaagaagagcaaatttccgatgaagacttaaataaaatattagaagctgctaagtttgctccaagcggaatgaatagtcaggattggcattttacagctgtacaaaatagagagaagataaacaatctgatttcagcagctaaagaagcattacaaaattctcctatagagcagataaataagatggccaataatccaaactttaacccattttataatgcacctactatagtgataacatcttgtgataaaaacttaccagtaggacagtctgattgtgctgcagcaatacaaaacataatgttagcagctcattcacttaacattggatcatgttgggtacataccttagctatggttggagatgatcctaaggtcagaaatgtgcttactgagctaggaattccagaaaactatgcgacatttggtacagcaaccctaggctttaatggagggaaagaaccaaaagctccaacaagaaaagaaggaacagtaaatatagtaaaataaaaaagagtaattagttaaaaagttgacttctaaatatgtgaaagtaaaaaatgtttaatgagactctatagttagaaagtattctagttatagagttttttgcttcataaattaataaaattgccttttctacgactggagcttagccattattaaaacacgataatattgaaatttatactatagtgtaagcatttcactaaagaattacagatttctaaaaagcatatggctatagctattgatgaatatgaaggaacatttggacttgtaactattgaagatattttagaagaaatagttggcgaaattcgagatgagttggatattaaaaattctaaaattctaaagaatttaagaatatatatttttaagaattttagaatttaagaattttacaatattttaataaaaagcagattgcttttaacattgtaaattctactttcaatgaagaacttagatgttctttactaagatgatgagatacttaataaatgcaaaggatgtagccttagacatatttgtgattagatatttgtttcaagattatattgcggaatagcaaattaatgaattatttaaaaagggaactatagtcaaaaaaattattatgaaaacttattgaatatcagtctgagtaagtataatatattcataggtagaaatatatgttaaagtttgcattatatgcaagtggaattttgctaatttatgattttatcaatcttatattaatacaggagggaggttacagtggtagacatcagataaagctctgacagtgtcagtcaaaaataaggagtgacgaaaaaatgaaaatttcaaagaaaagttggaccaccgtaagtgcttttgcaactagttgtgtgttcatgtttaatggaagtagtgcagtagcttccactaatccaaaagattctatagttattgatacatcatcatctactaatccaaaagattttaaagtttatgatgaatcaagcaattttacgataccagcagaaattcctgcatcaaaaatagggctgcctacatcaggtgctacgataagttcagcaactatagtgaaatctgatgaaaagggtaatctgaatggagaatactgcaaggtattaggtgcaatccatccagtagataaaaatgcgccagacattaactttcaggttaaccttcctgtaaaatggaacagtaaaatactacaatatggtggcggcggatttgacggtgctctggttactgctgatagtggatattacgggcaaatggtttcagatccaacacctttggctcaagggtatgtgacatttggcagtgatagtggtcatgtaaattcttcatattgggatagtaaatgggcgcttaatgatgaagccttaaataattttgcctctgaccagttaaagaaaacaaaagatacagtactagaaatagtgcaggccttttataaatccaagccgtctcaggtatattttgttggcgggtctaatggtggacgagaagcgttgaaggttgtgcaacatttcccaacagaatataacggcgttatttgctatttccctgtattaaactgggtacctaaggcaattgcagatagcagaaatgcagatgccgtacaagctaataatggagcgggttggatcagtcctgaacagtataagcttgttaatcaaaccatcattggaatagatgatggactagacggcgttaaagatggcataataagcaacatttatggagctgaaaaagagaaggatgaagttttaaaggctttgaaaaatatattatcagatgcgcagataaaaacattagaaacatttgcttcatctatgaaattcaattatcctcttgccaatggattaaccactatgccgggatatcctgtttttaagggagcacctttagccgatatgtatctaaaccaatttggtacagcaccaactgccagagatggcttaatggcagaaagtggggatgctgttattaaaaatatgatagttcgagatgataattttaatcctaaaaattttgatgcagataaatggcgcgacaaagttgtacaagcttcagaattacttgatgctacaaatccagatatctcagcttttaagaataatggaggaaaattgattcttattcatggagcaggagatcaaattgttaccttccaaggaacaattgactactataatcagctgattgacaaattcggtaaagactctcttggcgagtttgtaaaattctatatggttccaggaaatggccattataactcagaaacttggaatatgggatccgatacattgggcgcattagatcaatgggtagtaaataataagtctcctgagaatttgattgtaacagatcaatctgaaaagactaaaggtcgtacacgtccgcttttggaatatcctgcgtatccagagtacaaaggaagcggagatgtaaattctgctgaaaattttagtagagctacaccttaatgaaatggaaagagcttattctgttatataataaaataatgctgtttaataagtcgggataattaatcccgacttcaactttttctaattttgacacgttgaatatcataggataaaactttgcattttgatgcaaatgggtttgattactactcaaaagtaagtatagaattaaaataaaaagatttaaataagaaacccctaccacaaattagaaaaacagtatcatgggaaggaatggatagtagaagaggctccattagctttttatagagataagggctctagtagtaatgataagaataaataaaaaaatatgaatattgagtattgcgttttataatctacaatgttatacttcatttaaggtacattagtaccttaaatgaagtataacttggaggtgtttacgttttgtcaataatacaaacgaagaagttaacaaagagttacggatcaaaaaatagtgtttatgatattaatctgacagctaatgaaggtgaaatatatggctttctaggattaaacggtgcaggaaaaacaactacaatgaggatgttgcttaaaatggttaatcctacatctggtgaaatttattactctggacaatcaatttcaaagctaccttctgaattttggaatcaagtgggttacttaattgaaacaccacatgcttatcccaaccttacagtagaagaaaatcttatattatatgcaaagcaaagactaataccagattcagaaattaagaaacgaatagatgacatttcacagcatctattgctagataattacctacaggttaaggtaaaagatctttctctaggaaacaatcaaaaaattggattagctaaggcgcttattcataggccaaaaattcttttgttagacgaaccaacaaatggattggatccggaggggcttgtagttgttcgtaattctctattagaaatggctaaagaggggacaactatttttatttcaagccatctattagatgagatggaaaagctggtaagccgaattggtatattagcgcatggatgcctgctacgagaattaaatttttcggaatttgaaacctgcagagaatcaaagctttacataaaaacagatggctccgtcgagaatcttgaacattatcttgctacaaaaaacttgcaatgcacatcagtaagtgaacaggaaatacttgtttcggatatatctattaaccaatattctgctttattacagcagttagaaaatcaaaaattgaatccaatgatttttcaacctgtaaatgaaagcttagaagaattctttcttagaacaattaaggagggcaaatcattatgaaacagatatggtcaatgactaaaattgagttttacaaaataatacgggggcatataccaatttatattttagctttttatagttttttgttacttatccatatgcaggataaaacgtgggaagaatttttgaaaaatactttttttatgtattctactgttattggattaatgggatttggtattttaagcagctgggtatttggtagagagtatcaggatcaaacttttaaagatcttttatcattgccaatttctcgtacaagtttagtatgtgcaaagttttttgctttaggattaagttttttaggcataacggtattagcaattagtgggacatttgccatgggtttgtgcttggattttacaaattttgatgtgttattgactgggactcttctaaaaaggttaggtatagtaacactctataattgtagtcttagttttctattcccgcttatcgctagcatcacgcgaggaatattggctcccgttagtacttcctttgtagctataattatagctgccatttttggatcacagcccttaggccgttatatcccgtggacaatttcaggaatatatttaaataatcctcagcttattaattggatcagtaaattaacgattttggctattttatttattggtgtttatggtactatattatggtggaattatgtagaccaaaaataggaggttgtatcatgaatgaaaatgttagtagacgccgtggcgttatacttgaaaatgcgattttagatcaggcttggttattgcttaatcaaataggatatagcaaattgactatggatgaggtagctcgtgctgcaaaaaccaacaaaaatgctatttatcgtcgatggccacaaaaatgttatcttatttttgccgcattaagccgacatgcaccatcaatagaattagaagtcagtgatcatggttcgctaagagaagatttaaaggccttatttaatgttttaaatctatttgaaattatcaggcccgatgatctacgagatgtaattttagatatgctttctaatatgacgccttacgatttatttaatgttataaacaacggaaatggtcttcgtgaatcaactgaaactattataacgcgagctaatcatcgtaaagagatttcactttcagtagataatatttctgaaaaggctttaaatttaccagctatactaattataaatgagcttgttttacatggaaggatcacagaaacgaatgccgaggatattattgacaatattttacttccgatatataaagcgagtaaataagctaattggtaagaataacatgggacttataattaagattcctttgttatttcttaataaagaaaagagctggattcatagcataaagacaattagattagatttaaaaggttcaaatgttgattaaaaaataatacttggaccttttattaattagctcaatatctaatttagggaatgatttatgtaggctaaaaaatgagctatcgctaatggattttaatccgctaatgcgacagcccttataatgcctattttaatttcctaataggatctacttactaaaccatgctttactaagtaaattaacgccttcagcaatatcactgtcagtcatcccaccaaaaccaagaagaaccatattattaggatatttatccttgcgtaaccaatatgtagatacaggagaaactgtaacgccgtattctttagctttttctattatctcttcttcagataatccattatttaattctagcaagatatgcaaacctgcatttttaccatgaataataacattatctcccataaatttatgaatagagtggattaacatatcatgtcttcttttgtttaggagagatatcttgcgcagatgactatcccaatgtcctaaatgcataaactgttgaatgattttttgctcaactattggaactgaggtttggtagctactaaaaaatttatcatatatttctagtaatgattggggtaataccatataattcaatctcaagcttggggacaaagattttgaaaaagttccaatatatataacacagccttctgaatcaataccttgtattgaaggaattggccttgaattataacgaagttcactatcataatcatcttcaattataaatccattctctcttcttgcccaatctaataattgcaatcttttttgaattggcatcactgatccagtaggaaattgatgtgaaggagttacatatactatctttgcggaattattttctaattcagcaatatttattccatccttgtctaagctaattggaacaacatcatatccgttattgttaaaaatctttcttgcgccaatgtagccaggatcttctaaagctactttagaaaaattgtttctgaatatctggcatagtaaacttaaacactgctcaaagcctgaagtaatgataatttgttctggagtacatgagacccctcttgatttatttaaataatccatcatttctattcgtaattctttttcacctttactgctagtataagatgtcataacctcaccatctatagatgctaagcatttatttgatatcctcctccataagcgcaaaggaaaatcagaagcacgtagctttccatatttgaaattatacttatagttattatcagaattcatctcaggtaacgttgttttatgattcttaatattgtcagagttctctccctttaacttagtgattaacatactatctagtttttcaactatgaacccactgcctgctttacttgtaacatatccttcagaagaaagttgcatataagcactttctactgtatttctgctgacatttaatgttgctgcaagcgttcgtgttgaatatagcttactaccttccagaatttgtcctgaaattatctcttcttttaactgctcgtaaatttgcaaatacagtggaactcttgaatcattatctagaacaatcatttttttaaaacactctccttatgaactgtatccaataaaataaaaagaattggcacttttgatgattacacatcgattgtataattgttttatagaaaagtcaatgtgcataaattaagactttttaaaaatattaaaataataaaatttgtaaaattacagaggaggaatttaaatgttaaatgaaaaattgcttgaagttatatcacatgaaggtgtagtagctatagtatcttgtagtaacaatgaggcacatgtagttaatacttggaattcatatgttgttgctactgaagatggaagattattaataccagcagctggaatgagaagaactcaaaaaaatatagaacaaaataacaaagttaaggttactttaggaagtaaagaagtaatgggacatatgtatatgggagcaggattcttaatagaaggaactgcaaaattccttgaagagggttcagattttgatatgatgaaagaaaaattttctttcttaagtagagtattagagataacagttatatctgctaagcaaactatatagtaataatataacatagcttttgaaaaagagtactttatatttagtgaaatatctaaaaaagtactctttttagatactattaatatggattatgtaagtttaattcagcaatatatataggatataggactatataatatgagaagttgcatagcaattgattatgttcgtatataaataatcttatctatcaattagagggcagtttattaaagataggataaaggtaattattgtaggaaaacagttaggatattaatattgactcatacctaagggtaggaattaaaataggtgtataaagaaaaaatagctattcatatgatttgcgcaatatatagatttgtagtagcaattcatgaaaaatatggaaaaaacaaaaggaggaacataaattgaaagttgatttttatacatctaaaagagaatatgaagaacataaacaagagtttgataatgctgttattagcgttatgcaagaagggatttcaacccttggaaaagaggtaactgattttgaaaaatctattgaggagtttactggagctaaacatgcaattgctgttgcatctggaactgatgcgctaattttaacttcggatattttagggtttgaaagcggaaaagaagtcatcacatctccatttacatttcttgcatctacttcatgtataacaagaagagggggaaaaccagtttttgtagatgttgatgaggagacttttaatattgatgcaaataaaatagaagaaaaagttactaaaaatactgttggtatagttccgattcatcttttttcacaaatggctgatatggataaaataatggacatagcaggtaaacataatttgagagtacttgaagatgctgctgagggatttggaatgagatggaaaggaaatgggtctgaatataaacattcaggcactattggagattttgggattttctcattctttccaaccaagactcttggtggttttggggatggaggaatgatagtaacaaataatgatgaattagctagattagctagaatgtatagagttcacggagcatcaaaaaaatatcactatgagcatattggatacaattcaagattagatactatacaggcagctattcttcaagtgaaaatgaaatacataaaagaaagcattaaaaagagagaaatagttgccaattggtattttgataggttaaaagattgtcaggaattaaaatttgccactttgaaaggcgagcaaaatcttgtgtattatgtatttaatatattaacagaaaagagagatgaacttggagaatacttaaagaaaaatcagattcaatttagtatttattatcctataccattacatcttcaaaggtgtttcagttatttaggttataaaaaaggagattttccggttgctgaaagtatatgtgagagaatacttgcacttccaatatatcctcaaataacagaagcagaagttgattttgtatgtgaaactataaaaaatttttttagataatattagaagactataaaggtgagttagagagttaaaaatactagaaactttacataatatatagatttgatgtagtaaattataaaaatgttctttgaaaattg

SEQ ID NO: 127 - DNA, 14577 bp, Clostridium beijerinckii
atgaaaaaaattaaaaagttacaaataaagaaatttaacaatataataatttatattaaacaagaaccatattactttataaaatgtagtatattgaggctataagaaataatagattttaaatgaatataccctatatttgtttagctatatacataatattggaattaatattataattattatatgaaaatagtgtaattgagaatactataatgtgcttacacaaatgtgaatttggaagaaaaaatggatgagctttgtctagtatttatattgggttgccctcaataacaaaactatatgaatttattatattttgaggataaaaaacagctcaagcagaatttttagaagctaataaaaaatgaattttattttaataagaagttccttaatgaagatagtattttggaatttataaacttatatatattcagggggaataatatgtgggaaatatttaaagagccaaataagcgcagtaaatatgttaagaagatagttcagatgttaaatgactctgagactttgtattatttaaatatggctactgataagcgtaatagatatgatagagaagctatgacggatctattcttttttaagactaaaattcttattgtgatgattacgttaatagcacttttaaataagttaggattgcctgatattattaaggggtatcataatggaggagaatttccaataaaatctgcttttttagttggtttaagttttgtaataattattattcatattttaaagctggatgattattgcattaataatcttatatacaataacgagatgaataagaaaaagaagaaaacaaatgaatttataaatacaataaagaaagatcctaaaaatatttcttatgcttttcttagaagcactgtaaaagaagcattttctaaggtaattgagtcattggaacgcatgaattttgaaatgtgccaaaaatatatgagtaccgagttttatgatgggctgcaatcacaatgtaaaagatactcttttgagaatattggaaggataattgaagaacttgaatttatagaagcagagccagttggacttattcatcatcatgatagctataaagatatagtctggttcgtcattaaatataatgcaaaggattatgttgtagatgaaacagatggagagattctctttggaaacaataaagttaaggagtttgaacaatattggaagtttcaaaaagcagaggaaaatacctggctgctaagtgatgtggtagcaaaaggagagcgtgatataaaaaaatgctttaatattattgaagagttttaattttggctacaattttaacactctatgtttaagaataggaatgatcaatgtaaagtcaaaactgtgcatagtttctttagaagtagaagaaattatgcatagtttattaagtttaatgttttagctaagtatgtatggtttatattaattttttatattcaaatagtacaccttttgtaaccattgtccaaagtatatcgaacaattcatctatttcgatttcctgattttcataccaatggattatggttgatattactgcagaaaaacaaaattcacaaagatattcagcgtgaatattatccttaggtaagttaaatgcattaaaggcaattggaacaattgtcttttttagttttcctttaaatttaggatcaccattttcactgagcaaaattttcaaatgttcacttttagtaaagaaatatagatcagaagctttaggtcttaaacctttaattaagtgaggaaacaatattttgcttgcattatcatgtatataatgaagtaaaatattttcttcttgctcaagtatatcacttacacttgtgaaataagcatagaatgtacttcgattatagccggctacatcggctatttcttttactgttattttatctaatcttttcttttttaaaatcttccaaaatgcatctataatatttctttttgtttgttcggtaatttcaggttgtttattcatactatcgccttctttccaacacttgggtttattttgttgattgatgaaagtttcatatcagttataatttaattatacaacaccgtgttgtgtgattaaagatgtaatttgattgaaagattgaagatgcaatcaagaaaatttaaaaggggtgctttacaatgaaaattaagatgataaaaaagtttttactggttatcggaatagtggctatttgtttttttgtttttaaagtagtgaaaacaaattcaaagaaagaagaaaccgttttgccacctcctgtggtaaaaactctaacgatctcaacatccaataaagattcagaatatgtctattcaggagtagtccaacctcactataaaagtcaactggcattccaagtaggaggaaagattattaaaaaaaatgtgtcagttggagataaggtagaacaaggtgcagttctcatggaagttgattctagagatattgaacaagcagtaaaaaattctgaagcggcagtttcactagcagaagccaaatataaactggctgaagataatttgaaacgatatgagccactttatcaatctaaatttatatctcaggcagaatatgataattatgtgaatgctgatgaaacagcgaaggatgcattagaacaggccaatgcattgcatactcaaagtttaaatcaactggattattgtaaattatgtgctgataaatctggagtaatcagtggtattgatgctgaagaaggacaagttgtcacacctgggcagaagattataacactagttcagaataatcaattagaagtagaaattaacgttcctgaaaatagaattgaccaattaaaaagtgctaaagaaatcaatataagcttttcggctttatcagatgttaaattgaaaggctctttaggagaaatttctccagtagctaatgatgcatcacgtacttacagagttagaataaatcttatagatccacctcctaacataaaaataggaatgtcttctagtgtgtctattaacgaaaataactcatcaagtcaaatatggatgccacttggagccgtatatcagccagattcatctcctgctgtttgggttgttaaagataatgcagtcaccctgaaaaatattacagtaaaggatttcggtagtgatcaggttacagtaagtgatggcttaagcgaaggagatgtagtggtgacagctggcattaccaaactacgcgaaggtcaggacgtaagagtagggagtgataattaatgaagggtttcaatctgacagagtggtgtcttaatagaaaacaactggtttattttttagctattacaataattgtgtctgggatttttgtttatcctaaacttggaagaaatgaagatcctgaatttactattcgtgagatgtacataactgtcgtttggccaggttcaactgcaagtcaggttgaagagcaggttacagataaaatagagagaagacttcaagatatatctaataaggactatataaaaagttactcttttcctggtagatcagttattttcattgatttaaaagatgacgtggcttcagatagaattagagacacttgggttgaagttcgtaatgacattaatgatatgaaaggtagtttaccatcaaatatagttggccctaatttcaatgatagatatgatgacgtgtatggttgtgtttatgcattaacatctgatggctatacttatgaagaaatgagagaaaaagcagagaatattcgtaggactttattaaatgtaaaagatgttaaaaaagttgacttaataggtgttcaaacagaaaaaatatctattcagatagaaaatactaaaatggcgcagcttggtattagtccgaatacaatcagcagtgctctacagacacagaattctgttataccatctggaatgattcagacatcaacagataatgtttatcttagagtaagtggaatgtttgataatgttgacaatatctcaaacctaccaattaaagcaggtaatcaaacatttcgtttaggagatatagcaagtattacacgaggttattcagatcctccagatcctaaaatgttttttaatggaaaggaatcgataggaatcgcagtttctatggagaagggaggaaatgttctaaacttaggtgaaaatttagacaaaacactagatgagattaaaaacgatttacctctgggcttaaatatagatcaggtagctaatcagcctgaggctgttacagattctattaatgatttcttagaaacttttgttttagcgcttgttattgtaatgatagtaagttttgtaagcttaggtttcaggacaggattagtagttgcaatatcaattccactggttattgcaggagtgtttgttggaatgtactttttagggatcccacttcacaaagtatcacttggagctttaataattgcactgggactattggttgatgatgcaattatagcaattgaaatgatgtcagttaaacttgaggaaggatgggataggtttagagcaggttgtttcgcatttacatcaacagcttttcctatgcttacaggtacattgatcacttgttctgcttttacaccaataggcttttccaagggaagtgcatctgaatacactggaagcgtgtttactgtagttactatatcattacttttctcatgggctgtttcagtttgctttgttccagtattaggttttgatttaataaagattaaaaataatgaaaataaaaaatctgatgtatatgacagcaagttttataataaatttcgtggcgttttaaattggtgcttaaatcatagaaaattagtaataacaacaacactaatattgttttgtacttctggttatgcactttcacattatgttcaaaaagagttcttcccagcggcaacaaggcctgaacttttagtagatatgactttaccacaaggttcatcaattagtgcaactcaagaagctgcagatcgtctatcagaagctttaaaaggaaataaagacatcgttaattattcttattatgttggaagaggtgctccacgatttgttttatctttagagcctgcatcgcagaatagcaatgtcgcacagtttgttatattgacgaaagatattgcatcaagagaaagggtaaataagaatgttcagcaattgcttgatagcgggtttgaaaatattcaaagtcatataaaggttatccaaaatggtcctcctagtaattatcctgtcatgtttcgtgttacaggttatgataatgacaaagtacgtgaaattgcaggaaaagtacgagatgctatggcatctaatcagaaattatacaatattaatttcgactggtttgaaaaaacaaaagcaatgtctattgaagtggaacaggataaagctagggcacttggtttagacagtcaacaaatttcactattcttgcaaggacaattatccggcactacagcatctcaatttagacaagatgataagactgtagatataatagttaaaatggattcagttaatattaatgatcttggttatataaagaatataaatattccaataccaagcggcggttttataccaatggatcaaattgctaaaataaattatgatgctgaagatggctatatagtaagaagagatttgaaacccactataacagttcaagcagaagtattaccaggcataacaggaaatgatgcagaaacaaatatatacaatcagcttgaagatttacgaaagaccctcccttcaggatacagcatagatatggggggagctcttgaaagaagtaataaaggattagctcaggttagagatgttgctcctattatgatagttttaatggtaattcttttgatgcttcaactccaaaacgtaccaaagatgataatgaccttacttacagcaccacttggaataattggggtaacattagctttacttatgcttaacagtccaatggggtttgtcgtagtgttaggtattttagcactaatgggtataatcataagaaattctgtcatcttggttgatcaaattgcaaatcatattaagactggagaatctatccgtgaagccattatagattcaactatcttaagatttaggccaattatcttaactgctgtagctgcaattttagggatgttaccattaattaaaaatactttttggggtcctatggcagtggcaatgagtggaggactatttgttgcaactatcttaaccttgtttgtacttccagttatttatgcttcttggtacaaagtagacaaaaagcctgaaaatgaaattgttctagagaataaagaagtagaaataaaggaggaggaaattattaatgaaggcgagaatgaataatttgtgttaaatatagatatccaaactaagacctgaacttatgtgtatgcctcatcgaaatgaataacatacttttgttccagtttctaggtaattctgatgggtgattctaagtctataaagttgcacccaaagtgctagcctcaaagaacaagctttgaactagcacatttggaacaacttatagccaaagaatcacatccatcaaaattaccaatgaaacattccacaaaagtatattacccatttctagttgggatatatttcatagtataaatctaacttataattggcttatctatatatagataaacaatatataacttagacttatgcaataacctgccgaaagtaaaaacattgttatttcacagggctatgaaaatttcgctgaaagtactaaattgcaggttgcactactaatgcttgctcccaatttcattgtgacaagcattagttgaacaacctacaattaagagcttttaacagctcattttcaatgcctgctgcataaaaatgtttctactttctaatatggtatttactgcaaagtataaatcaaattcttaagttgtttatctatagtgttattcaatgagaacttatgtgtatccaatttctctatttgagatatttctaattttaaatatttaactcattaatgagtgcttatgagcaagctatagacatgaaaaaattgagtataagaaatatgaaagagtagcaaatcaaattattaattaagtgggtgaataataatgaataagaagataaataaagtaattgcggctgggattacagttagcatgattaatggagcgattattcctgcttttgcagctgaaaatgcgaaaacagtgtcagataaaaataattctattgtattaaattcaagtacatcaggtgaaaacactaatactttaaatggacaaactactaaaacaaagaaagttatcactttagatgagcttataaaatgtgctgttgataatagtgataagttagctttgaaagaaaaagaattgaaactgtatgatgataagttggatcttcaggatgaaaaagatgatttctccgatgataacaatttaaagaccggcaatgataaagtagatgactttccatctgataagcttaaacttcaaaagaaacaaacggctcagtctgaagcttttttgcatgatcaaataacaaatgatgttacaaagaggtataatgcaatcatcttaaaaaagattgatatagacaaattgaaaacaggcttagaaatcaaaaataatgatttagatgctttaaaaatgaaagtttcagtagggcttgcgattcctaatcagttggatgacaagcagattgaactgaataaggcacaagatgagataaaggctaaagaaaactcattaaaaaataatttagattatttaggagtattaacaaatctaaatttatcagattatacattggattcaagtattagttatgaaatattaaaaatagatggctcgctagatgaatatttagatgataaaatagatagttatttaaagtataattatgaaattattaaacttactgatgattatatgcatgggctacgagaagaggatatgaataaacttagttactatgaaaataaagtagtgaaggttaataaaaatgattattatgagattgatggtgatggcaacaaaacttttaatactcaggaatattgtttagccattgttagctatgtgcagcaatacttaaatgcatttaataattatcagtcctatttagaaggtagatacagtttagcagaagctaaggttaaattagatgattcaaagaaaagtcttaaaaatgtcttaaaagagaattattcaacagtgtgtgacttagaaaatcaaataaaaagattaaatgaacagattatatctaataatacaaagcttaggtctttaaaagcaaaattagatttaggaataataactgaaaatgactttaaagctgaacttctaaagagtaaggatttagataattcactaatgaatcttatcaatacttacaatatattaaaaaatagtattgaaaaaccttgggtacttagcagtaactaatagtagtggcggtactttgaattatatagataaacaatatatagcttagacttatgcaataacccgccgaaagtcgaaacattgttatttcacaggactatgaaaatttcgctgaaattgctaaattgcaggttgcacaactaatgcttgctcccaatttaattgtgacaagcattagttgaacaacctacaattaagagcttttaacagctcattttcaatgcctgctgcataaaaatgtttctactttctagtatggtatttattgcaaagtataaatcaaattcttaatttgtttatctatatatggaaatgtaactaaataacataggattagtttagaaagtagttggaataacttaaaaaataataggttatttcagctacttttctattttatgcagtatatggacatctacccaaaaagacatacatatactttattctttatgaattatactagcaattagatacatgtttgtaaaagaggcatttgatattgagttgtgatggttattagttgaacacatttctgcttgtcttaaacttgtttttggagcatgtagaaatggggttcaaccttataccttagaatcacccatcaaaattacatagaaactggaacaaaagcatattattcatttcggtaagctatacgctataaattatagccagtttatatatgctgaaattcacaattaaggttgaaattcttgcaatatattacggcaaataaccaagttaataaattgtaatatttttgttacaaataattaagtattttaaattaaaatattgatatgggttattgaggtgttggtttttgcacgaaataaaaaatattttggcgattattgttatatgatacaattttctcatataatgaggtataatttttagtagttaaatgataatcatggaaagatattatatatgccgtaattcacaatgcatattttacaattcacaattgcagctaaaatgcttgcaatattttagaattatttataaaggattatttttataatatacataataagaaatacgaggggataaggaaatgagaaacaattacagatatagcagatataacagaaatgttcgcatacgaagaaagaaaatattaattttaactattataattgtggcattaggaggtttggctacatctataatagatgataaatttttttcaaaggataagaatgtacaagcacttgcatctaatgaggctgttgtgtcaaagcaagatgatgaagctaataaaaccaaagaagacgatacaaacgctgaagtacaaagtgattctaatgttgatgatgttgcatctgtagagaaatttttaactcaacaagcgaaagggcagaaaattgaagatactgatggtaaaaaagtcgtttacttatcttttgatgacggaccatctgaaactaatactccatcaatattaaagactcttaaggacgaaaatgtaaaagcaactttttttgttcttggaaaagcaatagatcaaagtgaaactaataaaaatttgctaaagcaggaagttgaagaaggacatgctataggaaatcattcgtattcacataattacaagtacttatatcccaatggaagtgtcaacacaaataacttcatgtcggagattaataaaactaatgagtctttaaagaaagtgttaggagaagatttttctacaagggctattagatttccagggggacatatgtcttggaaaaatactggagaagtagacaaaataatgaaggaaaaagattaccattatgtagattggaatgcattatcaaaagatgcagaaggtcctcataaaaatgcagatcaattaacagaagaggttaagaagactgttggaaacaagacaaaagtagtactattaatgcatgacacatatggtaaagaagaaacagctaaagcattaccaggaataatagagtatttaaagaaccaagggtatgaatttaggatttttaaatgaaattcaatagtgtagttatgaaaaatttttgttatttaggttttaagatttataatgttttgattctcagtatgtcataaattatatgaagttaggttatgataagttaagaagaatagcagaaaataaaaatatatgataaaatacctttgaatgtattctttaatattttcaaaggtatttaaatctaattttaataagaggatagaagaaaagatggaaaaaaaaataagaatagttagtcctgtttatcagcagattgccacagatattgcttcaaaaatagcaagtggacattatcaagttggtgaaaaaatatatgcacgttctgtacttgcaagtcaatatggagtttcagcagaaacggctagaagagctatagcaatacttgctgatgtggatattgtagataccaataagggcagtggtgtaataataaaatcaactgaaaatgctataaagtttataaagcagtataatgatgttaagacagttaatgatttaagaaacgatatattagataaattagaagagcagaaaaaagaaaatgatttattaagagaacaaataattgatttgttagataggactgatagatttaagtccataaatccattcataccatttgagatacgtataactaaggaaacgccatacatagataaaaatgtagctgaaattaatttttggcataatacctctgcaacaattgtatgtatcaagagaaacggatgtctagaaatgtcaccaggaccatatgctgtgttacgcgataacgatattttttattttgtcggtgatgaaagctgctatgagagagtaaataaattcttatatccataatatttctgaattaatttgcaacgggtaatatattaatcatttagattataaaaatggttagtatattacccgttataattttagcgtgaaaaatctgaatccaaatcaaaattaaatatataacaactcacttccaatgcccattgaatgctatgaaactggagtttattaatatgtatctaattttaatctttgtaatatttcaaattttaaatgtgaaactctataacacaaaaagcaaaaaagttcaaatttgacaaaagtaacaaccttatattacaattaagttgttactaaaactataaaaagtaacaacttgtatatagatataaagttgttaacagaaagggagtggaatttttgatagaatttaaaaatattcgcaaagattttaaaaacaaaacaatactcaaggatattacactaaagataaatagaggagagcttgttgctattataggatcaagtggatgtggaaagaccacaaccttaaaaatgataaataggttaattaagccaacgtcaggtaagatttttattaatggagaagatattgcatcaaaagatgtgataaaacttagacgaaatattggatatgtaatacagcagacaggattgtttccgcatctaacaattagagaaaatattgagatgatccctaaagttgaaaagttaaataaagcaagtatagaaaaaagaactcttgaacttatggatatggttggtttaaatagcaatgactttttagatagatatccaacagaacttagtggtgggcagcagcagagagtaggagttgcaagagcctttgctactaatccagaaataattttaatggacgagccttttagtgcattagatccaattactagggctcagcttcaagaagaattaattgatttacagagtaaattaaaaagaactattgtgtttgtaactcatgatatggatgaagcaataaaaatagcagataaaatttgcataatgaataaaggcgagattatacaatatgatactccagaaaatatacttaaaaatcctataaatgattttgttgatgagtttattggtaagaatagaatatggtcttcgccagaattcataagagctaaggatataatgattgatcatcctgttacttgttctaaaagtgcatcgcttttaagatgtattgaaaaaatgagaagttcaaaagttgatagcttaatggttatagataaagaaaattatcttttaggaattattacagcaaaacagattcaaaataaaactgatagaaatattccggttgaagagataatgactaataaatttataagcgttgagcctgatgattctattatagatattcttgaacttgtaaaggaacatagaataggacaagtacctgttattgatgactttggagttctaaaaggaataattacgaaaagtagcttagtaacaactctaagtagtcagtttttagatacggaagaggtgaaataatatgaacgaatttttaaattacatttttacagcaaaagagcagataatttcattactttttgagcatattaaacttacagcattatctgttggtattgcaataataattggtatgcctctaggaattcttacaagctatgtgaaaaaactaaataagccaattctaggaatagcaagtgttgtacaagcgattccaagcatggcgttactgggatttgcaataccgtttttaggaataggtacgccaccagcaattgtaatggtagtactatattcattattgccaataataaaaaatacaacaacaggaattgataatattaatccagatatgatagaggcttctaagggaataggacttactaaatttcaagttttagttaaagttcaaattccattagcattgccagtaataatgtcaggaataagaatatcagcagttacagcagtagggcttatgactatggcagcatttattggaggcggtggcctaggatatttagtcttttctggtataagaactgttaacaattatcaaattttagcaggagcaattccagcatgtatattggcattagtagtagatgggctatttagtattgtagaaaaacttgttacaccaatcagtttacaaaagtctaataataaatctaaagaagcaaaaatcaaagctagaaaaatacaaaagactatattagcagctactgcatgtatacttgttggaatatttgttgtaactgggatatctcacagaatttcgaataaaaaagttattacaattggaagtaaagacttcacagaacaagaaatattagggaatatattgtcagagcttattgaaagaaaaacagatatttcagttaatcgtaaatttgcattaggtggtactcaggttatattttcagctatgaaaaatggtgatgttgacatgtctgtagattatacaggtacagcttatggagatgaattaaagtataaaccaatatcagatgtagaagaagtttataatacagtaaaaaaagattttaaagataagtataatatagaagtattaaaacaaatgggatttaataatacctatacacttgctgtaacaaaagaaactgctaaaaaatataatttaaaaacaataagtgacttatttaaagtttcaaatgacattactgcaactacaaccttagagttcctgaatagggaagatggactagtaggtttatctaaaaaatataatttgaattttaagaataccgtgggcatagatggtagtccaagatatgcagctttaatgaataaagaaagtgatgttatagatgcattttcaacagatggattattaaaaaaatatgatttaagtgttttaaaagatgataaaaacttcttccctccatattatgcggttccagttgtacgagctgagacattaaagaaatatcctgaaatacaaccgcttgtagagggagtaggagatttacttaataatgatgtaatgagcgaattaaactatgaagtagatgaattaaaaaaagatcctaaagatgttgctgtagattttctagaaaagaatggattgatttaattaaattaaagtaaaataaaataaatttaagacaggttattatgtaaaatggaacctatgaaatagacactaaaaaaagactatttcaataggttctttttttgtacaataaaagataagaagaaatatagtaaggttgtgaaaagaatgagtaaaaaattattttcagat

SEQ ID NO: 128 - DNA, 14260 bp, Clostridium beijerinckii
tgccaaataaagttcgtgctagagttgcagtagaagcattaacaagctttggatggcacaaatatgtaggtcttgatggagatgttatatctttagatacttttggagcatcaggtaaagcagaaatactattcgagaaatttggattcactgtagaaaatgttgttaaaaaggctattaatgtagcaaagaaatagatgttacagtaataaaatctacgatacagtgtaagctaagtgttcaaataagactataatgtaaaaaataattatgagaagtatataagaaaatttaaggatattattaatgaagctgttactggtaaaaagagtttttgcctgtagcggcttttttaaaacaacttgttttctaaaaaaacaaatacctaaaaagtagcatgtgttcctaaattataaaaaatatataaagtggttacagtatatgatatattgaattcataggaatcaacttattatgattaaaaaatttatgttaataataaaaagataatgtgcaatggagggttttatatgtttcataagaaattaaaagatttcccaaagaattttttatggggagcttcaacatcagcttatcaagtagaaggtgcttataatgaagatggaaagggattatccgttcaagatacaaaggaaccattcccaggaacaccagattttaaggtgtctagtgatcactatcaccattacaaagaagatgtagcattatttgcagaaatgggatttaagacttatcgtttttcaattgcatggactagaataataccaaatggggtaggggatgtaaatcctaaaggaattgaattttataacaatttaatcaatgaactattatcatacggaatagaaccgctagttactatgtatcattttgatttgccagatgcgcttcaaagagaaggtggttggtcaaatagaaagactgctgatgcatttgtaaattatgcaaaagtattgtttgaaaatttcggtgatagagttaagtattggcttacaataaatgagcagaatatgatgatacttcatggaggggcaattggaactgtaaatgatggagtagaaaatattgaaaaagaattatataaacaaaatcatcatatgatgcttgcgcaagcgcaaacaatgaagttatgccatagtatgtgcccaaaagcgaaaatagggcctgcacctaatataagttcaatatatccagcaagttcaagaccagaagatatattagcggctagtaaccaatcatctataaggaattggttatacttagatatggctgtacatggtaggtataatccaatagcttggagctatatggttgaaaaaggaatcgagccaactattgaagatggagatatggaaatattaaaaggtggaaatccagatttcatagcatttaattattattgtacaggaacagcagaggaaagtaagattgatgataaagaagtttcgactcaaggtggagatcaacaaattgctgtaggagatttaggtgtttataaaggagcttctaatccgaacttggagaaaactcaatttggatgggagattgatcctataggatttagaaatactttaagggaagtatatgaaagatataatttacctataataattactgagaatggattaggtgcttatgataatgttgaagaaaatgatactataaatgatgattatagaattgattatttaagaaaacatatcgaacaggctagacttgctataactgatggagtagatttgattggatattgtccatggtcagctatagatcttataagtactcaccaaggtttcaagaaaagatatggctttatatatgtaaatagagatgaatttgatctcaaggatttaagaagaataagaaagaagagtttcttctggtataaaaaagtcatcgaaactaatggagaagaaatttagtgaaagataattaatataatattagaataaaataatagtatttaaaaatagatactaatataaatgaaatataccaaggtgtaagaaatttcactttggtatattttgcttttataatatagctggaaggaatttttacaaacatagccttaaaagtttttttcaaataatgtatacttaaattaaaagaactttggtggatagtatcaatgaagataaattatactatctaccaaagtcataaaaggctaactagtatagtgttttaaattttaagacaacaatatattcaagtatatatgaatgtaaaaaagctagttataaaggaagaggttgattaaattatgtttaattatgaaattatccagagtttaaacgatttagagttgtctctatacagatatataatgaagaatattgaaaaagttgtttatatgagaattagagaattagctgacgaagcacatgtgtcaacaacaactatattaaggttttgtaaaaagttgaactgtgaagggtattcagaatttaaagtgaaattaaaattgtatcttgaagaaaatgaaagtactaaagtaaataatgatacatcgataatagttgatttttttaaaaaattagataatagcgagcttgatagaaaattaaacgtactctgcgatttaataaagaaagcaagcaatgtagtatttataggaacgggaacatccggaatactgtgtaaatatgcagccagatatttttcatcaattggtaagttttctatgtatatagatgatccatattttccaagaaattataagctatatgaagattcaataataatagcaatgtcagtttcaggcgaaacacgtacggttattgattatataagtaatataaaaagagagaatactacgcttgtaagcataacaaatagtgaaaattgtacaatatcgaaaatatcagatcttaatatatcgtattatgtccaacaagaaagattagggattagtgatataacaacacaaatacctgtattatatattattgaaagtatgggaaaaaggctacataataagtttatagtagattcttctgattattctaagtaaaacttcaatatccctataaaagaatatgtttattcttttatagggatatattggtattaaagtttactttgtaattcaggagctgagtttgataaaagattcatcaaatagcatatttcatcatctgatatttctactttatatttgctagttataaagtttaaattttcttttattatattatatagatttatattttcttctagatatttctctttttgaggataaacagccggattatcttcatttcttaatcgtcctattacaaatgataaatggagaataacgccaaccatattttcatcagataatttaattaagagtttctcttgtaatatattcaaaaatagagtcacatctttataaagttcaacaccatctatattatatatattttcctttataattttaggtagattaatcatagttaattttgaatcaattatactttgtaattcttttaatacattcatgttaaatacttcgtacattgtatattgttttataggtgaatctacaggaaaagatgaaactataaaaagtacctcatttttttcttgaagattaattattttttgcttgaagtattttttgtctaagcagtttagacaaacgacttcaaaataatctttatctaatctaagattacttagtaagaagtttttaattgcaatagcagctccctcaccagttaagcaggcagttactattaaaactttatctgaatcgctagaaggattacttatatttttatgtatttctacataagaatttaccataagaacatcattatatatttcgtctagcgatgatccaattaatgcttttcgtgctgcttctaaaacatgtaaagttgaaacaagagatatcactttaatgtctacttgaaattccttttttataacatctgcaaaagttgttaaagaccccatatctaccaataagagataaccagcagaagttggattgtcctgaataccaatcttaaggctttctaatacttttgatggagcaacatctattggagcgtttattggaattatatagttttctccaagtagtctgttagaaacatcagccattgaagttgcagttgattcaccatgagcaattaggataacttttactttatcttgagatttatcgttaaaagtattatctggtatcaagaataatgttaagtatccagcttcatctattggaattgatttattaatagtgttttctatgatctccttaatctctagtgcaacagcaaattcagaaggataaagatcttttattctatttaaattagtgtttattattatcttgtcgctgtttattctattaattaatgtgtttatatgcagagcaaaagccgtatataaattactatcaaaaattacaggaagctttcgagttatatgacttactatactatcaatacattttaatgtatcttcatcaataatggttaataagttttgtttgcttgtttcttcggaaacttcagagttatttttattgaaatgtttggctatatctttctcaagaatgttctcaatatcaatatctgaaatttctagagacttaagcttttcaagtttactttctataaaatcgtaaatagtattatctccattattaaatatagtgtttgtatcttcattagaaccattaaatctgaaatattcaatttcttcactcataagtttattccataaaactctatgttctttctctttataaagaccttctttaatataaggaggcagtattttactatggattcttacgtcgcgtcgtatattagttaagtattcagagtatgcttttgcacaaagtagctgaacgtcgcttttcaactgacctatattattaggacaatcataagaaagtaatgctctaagagagtttaaagatacataaatctctttatttaaacggatactttcatatttgaagaaacttttaattaaaaataatctttcatctaaagttctttctttaagagaaggaatattaataacaagaggaattcttcttgtaaatgtgtttaataaagcagaatttgggtcttctgttgtagctgaaattattaatacatctgattttctggtttctgaatccccaatgcgtctaaaagtacctgtatctaaaaatatgaatagagcttcctgcccttcaggtggcaatctgtgaatctcatctaaaaataaaataccaccatcagcctgttctattaatccgactttgtcagattcagctccagtatacgcacctttttttacaccaaaaagttgagaagttaatagttgtgggttattagtataatctgcacagttaaacactataaaaggagaatcttctgtttttaccttcatttccaatgcataattgtgcataagagatgcgaacatagactttcctacaccagtactacctaatattaaacaattcatacctttaggtggatatagtatagctgctttagcctgttccacagaatctttaagagaaatattatttttagctaacaaatctagttgagattcattgctttgaatcttattttcagcaagaaaaaataatactggtctacctgatgatttatacaatttaccttccttacaaagttcatttagttcatggcttaaattagctctagtcatattaactagaggcgctagtgttttagtatctattccatctggagaatttagctggagaagtttttggtaaatcaaatcttttttagccattatatgtcctcctatataactaaaaatattatagctactataaatagattaagcattttcatacactatgctgaaaacactatagtaagtagactattatagtaaaattatttattatcaaacattgtttatttagtgtttacatacagttttaaaattaatcaaacactatatataattataaaacactaagtgtattaagtaaacacatatcataaaataaataaaatatataacttttattataaaaatgatataacttttgtgtaaaattatattgtctatttttattataagtgttgatatataggaacgatccgatagtatgtaaaatttaaacagcaaaaaaattagaaaaaaatttaaatatttaatagtgtttggcacaggtattgctatatatattggcatgaagcaataaagcatcaagtaaaactttattcagtgggagtttaatatatcttctgaattttagtttaacttatccagaagtatgtagccgttaactatattacggatactatctattggataaattggaggaggagtacaaatggatcaattagaaatggcaataatgaatattataatcaatgcaggagattgtaaaaatcatgcttatatggctcttagtttagtaaacgaaggtaagtatgaagaagctgaaaatgaaatgcaactagcaaatgatgcgttaggaaaagcgcatgatgcacaaacagaaatgcttcaaaaagaagcttctggagaaaaagtagagttatcagttttatttgttcatgcacaagatcatttaatgacatctatatcagaaaagaatcttattgaacaaattatagaattaagaaaaattgtaaacactttagtaaaataaaaaattgaagcttggaaaagtaaatagacaagctatattttgtaaatactataaaaataaaattcgcaagtaactttaaaattaacacaaaactatataaaggtatagaacatattaaaatttataaaagttaaatcaaggaggaagaaatatggttacaatcaaattattctgtgcatcaggaatgtcaacaagtgttttagttaataagatgaaggaggcagctaaagctaaaggtgttgatgcagaaattatagcatttccagaatctcaaatggatagacatttagatagtatggatgttgcattacttgggccacaagtaggatatactttaggaaaagcaaagaaactttgtgaaccacatggcattccagtagaagtaataccaatggttgattatggaatgatgaatggagctaaagttttagatctagcattaaatcttgcaaaaaataaataattgaaaaattaattatttttataaacttaaccaataagaaataatttgcaaaaataaacagcatttgtagttttacatgattaagtaaaaatacaaatgcacatataaagatatatctaatcgattaacttatattcatatgttatatgaggaaagaaaacctttaacaacaattataggaaaatcaaaataaatatgtaagtttataagtaataatagcaaatttttatttgtaattattcatattataatcacaatttagttataagggggaaatttattatgtcactcaatcaaacactgaacgaaaaagtagtgccagcggtaatgaaattcgttaatcttaaaggtgttcaagcattaaaagatggtatgttatttactttaccattaaatattgttggatctatattcttattaattgcttgcttcccagtaaaagcatttacagatggtatggctagcgcttttggaccaggttggaatgatccattatttaaattacagcattcaacaatgggtattatggcagtggtagctgttataggtatgacttatgtatactgtaaaaatgaaggtcttgaacctttttcaccagcagtaattgctttaagtgtattcttaactgtaacaaatgattttgttatgtttaaagctacacctgatgcaactccaattcaagttggtggagttattccacaagactggactggtggatcaggtatgattactgcaattattgtaagtttagttgtttcatttgtttattgcgcaatggtaaagaaaaatattacaatcaagatgccagaaggtgtacctcaaggtgttgttaatgcattctcagcattaattccagctacagttatatttataggtgcaactgttgtatatgcggtatgtaagtttggattcaatacttcttttgtagaaattatatataaagttgttcaaacaccattacaagctgcatcagattcacttccaggagctatacttattgcttttgctgttccattcttatggttcttcggaattcatggaggtatgacagtatcaggtatggtaggtgctttattaactgctaatactgcagctaatgctaaattacaagaagcagggactttagatcttgctcacggagctcatatagtaactcaacaattctatgataacttcattaacttagcaggtagtggtcaaacacttggatttactatattattattagtacttgcaaaatctgctcaatataaacaattaggtagattagcacttccagctaacttatttaatattaatgaacctgtattatttggtactccagtagtaatgaacccaataatgggtgtaccattcatacttactccagtagtaaatgcaatattactttattttgcaattgcaacaggaatacttgcaccaatgggtggagcattaccaccttggacagttccagctgtattctcaggattaataattggtggtcctagttatgctatagctcaattagtattcctacttgttggaatggcaatatacttcccattctttaagaaagttgatgctatgtcatatgctgatgaattagcagcacaaaaacacgaaaatagcgctcaagcgtaaatacaattaattagccctattattaacaatttaaaataaatttaaaaactctaacatttttaattattaaaattatgatttctgcagcaacagaaacacaatgagaaaataattaaaatgttagagtttactcagtataattctgaaaaataaaatatataatatgttaatagtcaaattataaaattaaattaagataaaattatttgttttttcaaaagattaattagaagtgaggtagaaaaatgatattaataaactgtgcattaagacaagatgatataataaatatagtagaaaatattgaagttgagaatgaaaaagtatttaaatttgttaaaaaggaagggattaaaatactttttgagtgtatccttagtgatcaacaaaatgcggctgcaattgcaaaacaatcaataaaagatactgaacttggaaaagtattatattttggagttagtgtacaataaaaaattagatatagtttaattatttatattgtagataaaaagcattttcttatagttaagaagatgctttttattagttctatataatttgcttaatttcgagttggtgaaattattttttgataattaaaataaatttagtgattaaacagttcttggaagtgttcaaacactaatcacaattatatactttcatctaaacactggacaatattaccaaaactctaataagaataatcaaactcttatattagatattgattatattaagtaaacatataaaatgttaatcataatttgaatgcataaaatttcctgtaaacgtttttaaaaatctagggttaagattaatatagataatattaatatgtttaaaataatgtctactaaaaagcagaatagtgtttggcacaatttatgctatgcaataggataaaaggaaaaatattctaaaagacattgaatgggggagtgtagagtggaagagttagaaatggcaatcatgaacattataataaacgctggagattgtaaaaatcatgcgtatatggcacttaacaatgtaaatgaaggaaaatacgaagaagctgataaggaaatgcaattagcaaatgatgcattagcaaaagcacatgatgggcaaacaatgttccttcataaagaagcaaatggtgaaaagattgacatgtcagttttgtttgtgcatgcacaagatcatctaatgacagcaataacagagaaaaacttaattgaacagataatggaactaagaaaagtggtaaatacattagttaaataattaataaagagattaaaatttcataagtacatttattcaaagtttatataaataaatttatatttcaggaggaatgaaccatggtaataattagattattttgtgcagcaggaatgtcaacaagtcttttagtaaacaaaatgaaggaggcagctaagaataaggggatagatgtagatattgaagcttttccagaaagtcaaatggataaaaatatagagggagttgatgttgcattattgggtccgcaagttggatatacattaaacaaagcaaaaaggatatgcgaacctaaaggaatacctgtggatgttataccaatggttgactatggaatgatgaatgggcaaaaagttttagactttgccttaaagctagcaggaaaatagttaaaaagtttttacaatatcattttttataaattatctaatagaccgtgttaatttatatttattaatttttaaggaggaattattatgtcatcatctgggacaactttaaacgaaaaagtattgccaatagttatgaagtttgttggtttaaagggagttgttgcattaaaagacggtattttattcactttaccattaactttggtaggatcggtatttttattgctagcgcaattgccataccaaccgttaaatgattggctaaatgttacattaggtgcaggatggactgacccgctgtttaaagcaaatggggcaacttttaacatgatagcacttgttgcaacaataggaatagcatacacttatgctaaaaatgaaggtcatgaacctttatcagcaggaataatatcatttgtagtatttatattaacaactagctcttcagtaactactaaaagtggagaaacagtaggtgatgtcataccaacagcatggtgtggtggaaagggaatggttacagcaattataataggattaatagttggagcggtttattcatggtttatggcaaataagattacaataaagatgcctgatggcgtaccacagggagttgtgaattcgtttgcagcattaataccagcagcagttatagtgcttggagcaacaatagtttatatgatatttaaatggggattacaaacaacatttattgaatggatatataaagtacttcaaacaccattacaaggtatgacagactcattaggtggagttttagtcatgggatttttaattccattcttatggtggtttggtgttcatggagcaacaatagtaagcggtgtaatgtcaggaatattacaatcaaataccttagataatgcagctatagttacaagtggaaaagaattaacaatagcaaatggagctcatatagtaacacagcaatttcttgatcaatttatgacagtaacaggatctggtatgacaataggtttagtaatatgtatgttattttttgcaaaatcggcacaatgcaaacaattaggaaaactcgcaatagtaccaggaatatttaatataaatgaaccaattacatttggaacaccaatagtaatgaatccatttatggcaattccatttataattactccaatgctatcaggcacaatactttattttgcaatagcaacaggaatagttccaccatttggaggggtaatggttccatggacaactccggcaccaatatcaggacttttgacaggtggagttagaacagcaatattacagttattagtattagcaatgtcattcttcgtttaccttccattctttaagagacaagatagtataaacctaaaaaatgaattggcagctcaacatggtgataatattcaggcataagaattattaaataatattattatgacaaggaaagattaaaactttaggtaattagaatttaagcttatcatttgtaaaaaaatacaaatgatgagcttttttaaaatttgagttaatattaagatttactagctgctggttctacattccaattatctttagtagaatatactgaaattccatcaggattattgcttgtctcatatatgttgacaccacatgtagttagaacattgtaagattcattagtagtgctaatagattctttagctctagaaattattcctacaattgggttaacatatccgataaatggatacgatgaagatgttggatttccatgatgaggaacttttaatacatcaacttcttttccatctaaggcttttctactaagaaagtcgttttctgcgccccattcaatatctgcagcaaataattcttgaagatcatgataattcaaataaacaagagcagagttattgtttagcaatgtatattcttggtaagggttagctgcttcaaagcttggataatccttatcagcatgaacaaattgtaaaatattttcgctatcaatatatgattttggttcagctgtaactaaaggtactccgcttttctttatagcattcattgtttctgtatatacttcataatcatgtttcataatttctttttcactggcactagaagtagtatcatttatacttgtaaagtctttcatttcaaagtatttaggaaccaatatttttccgacattaaagttttttagcaaatcaatcactccaccaatgtgatctgagtgaggatgtgtaagcactacgtaatctacaactccttttccattagaagttttgctagtgttagattcagtagcttgtacactactactagtagtagtagatttgaaaaaatctttttttaggttttgactatttaaaaagtctattaatgtttcgctagttgttgtatcaccagtatctattaagacagtttctccactaggtaatcttataaatgcacagtcagcattgcctacatttaaatggcgtacaaataaatagtctttatcatctttatctgaaccttggtagtaaccatttgaattaaaatcttccatagttccgtttaaataaagctttccagtcgcaacagaaccatcggattttatgtaatatttgtgatttctagaatcaacccaagtatttacaaccattattcctttgtcatcagaataatattctttatttttataatagtaaaggcctttttgaagttgcccatcatcgctaaagaaataccaattatcatctattaatgttttatgagtagccatgtgaccgtattgatcaaaataataagtatccccattgattttttgccatccagtttccatagcaccgttcttgtctgtatagtagatattattatcataaacccatccagtttgcagtattccatctttattgaagtaataccaggttccgtctatttctttccagccaattactactgaaaaatcactatctagataatatttatcatcatagcctttatctttagaagttatatcaggattaacatctttctccatgaaccatccagttttttcgaggactttatcactaactatatagtattttttagaatcaatagttttccatccatatggaatagatacttcttcttgcttattcggtacagcagttgcgttgttgttattattattattattattattattatctgtgtctttttttgaatctttttctgattcgttacttgaaacgcttgtactgatatctttgttagtattttttgaagaatcttcgtttgttgaattatgtaaagttgattcatttgttttttgtgaaatttcatttgtttgctgttcagcatatactattgtttctgtaaaaagatgaaaagataaacagattagaaagaatagtataaaacttttaaaatattttgtcatcattatcttttaacactccttaaattcaatacaaaatattatagcacataatcaagcaaattttaagccaagtctcgggatttattccgcattatgtaaaattaagaaaaaatttttaaaggtaatagaaaaataacaagtcaatatgttagtggattttgcattatgtttagtacggaaactaagctaatagttctctatgagatagatatctttccgtgtatgacgcaaaatacacaaggcattttagacttgttattttctttaataatcattgaacaaaacaaaatatgaataacataattatattgttatcttttaacttctcaatagctttttatataatttaggattgattttaaatatagaaaataaaattatccagtgaagctgttttttattgctttgaatataagatttatatgtttctgataccttatggttaatcaaggttaaatattcag

SEQ ID NO: 129 - DNA, 14110 bp, Clostridium beijerinckii
atttctactaataagttttgcataaaatcccatcctttgttttatttatttggtcgcacttatataataaaacattttgatgggattttttatcccttaaatttttccatcgaactcacgttatttagacatcttttcggctatattttgggcttgaagtgataattcttcagttgatgccgcagtttcttgtgccttagctgtgttaatctgtataacttcagagatttcgttaactctcgttgtcattttcattatctcattcgtttgatcttgcgatgctagtgatatttcattgaccaatttagcactattatctacattaaccactatattttgtaatgaattcgaagcctcttttgctaaactttcaccttttttaactgcaaataaagaatttcctattaacatattagtatttttaactgcatttgagcattgttcggctaagctcttaacttcattagctaccaccgcaaatccttttccagtttctccagctctcgcagcctcaatagcagcattaagcgccaaaaggtttgtttgtgatgctatattttctatagagcttgtaatctttgaaatctgattggaagattgagcaatctcctctatagatttcattaactcttccattttgtgatttccttcagatacaatatccttggtactttccgatactttattagcttcctctgcattttgggcgtttatagtaactttagttaatattttattaaaattgtctaaaagtttttctattatacttgcttgatttgttgctccatctgatagttcttttgtaattagtgatatttgttctgatctatttgatgttaactctactgtccttgatataccatagaaatcactattcaatgtgtttataatactctcaagcgactcttgtataggaataaaatcgcatttatattgcacatttttctctaactctatatccaaatttccaactgatattttttctaaaattgttgtaatatcatctacatatgagtctatcatctcaatagcgctaatcaaattacttgccatctcacccatttcatctgtagattcatagctactttcaactttgagatttccatataataattcttcagatatttcttttatattattaattcctttaataaatatatctgtcaacacgccgcttattgttgacgttattattagtgtactgatcattatgattattataaatcctaatattatattgttaattatatctaccttatgtaaaaaattagatgtttgtttttgagactgtttatatacttctataactttatctgctattccatctatttgataagaatatgtattttccattactgataaggctgatatcttctctttcttatttatcaattccactatatcacttctactttttgcggctaattctacagatgaattaatctcatcaattagctcataatcaggtagtgtttcttttaaaattttagaattactatcgaattcttttacttcttcatttactaattctaaatatttttgttctttctccatatcttcctcagctattgctttataagatttttctctattttttgtaaactaattctcatatttgatatattatctgaaagtgcatatgatttcctatatgacaaattggttttataagaaaacatatataaaatacttactattataatcatgcttattattgtaaacatattgattattaagaatgatttttttattttcttatttattggatctcctgatataagttcatgtaatctttggtacataactgtttccccccgaataataaaatacatttttcctttttataatcatgattaatttatctttcttgctaattaatcaccgaaattaatgatggtatgagttttaattgcattaatttttcttttcgccatttaattgataatgaatttcatttactattatatcaatttatgtaccaaattcaagacatatatgaaaaaatatgaaatataagtaattctataattttttataacacaaaaaacctcgctataaatttaatatctatagcgaggttatatgttgtgctactctttctgtcaatcgtataattgaataaaattaatatattatccattaattcttttctaatatattctctactttgaaatctaaatattcttatttcattgctttaaacatacatgttttagttgttattgatatgtctccatttttcttaatatattcttctaaatatttcgtaaattcttttttcttttcaccaataagtattgaacttccttgaatagttgaagctttatatgaaactactggttcagccttatctactattattttaccatctaaaatttcaacatctactttatgaaaatatttttcaagcattcctcttccgtgctctaggtcaaatctttctgaatacccattgttatctaacccagaattaggtgcaaaattttctgaaagtctatttaattctttcatagaattacaagaattagctgtcacataaaatacaccattaggctttagtactctttgtatctcagctaaagccttttctatatctggaacaaaataaatcatatgttgagcgatgattatatcaaaagtttcatcattataaggtatttcttcagcattaatttcttcataatgaaaatcatgatatacatctttcaatctatttcttgcgattctaatcatacttctagaaaaatcagatattgtaatatttaaagtattctctatataatctttattcttaaaccaaagctttcctgttccacatccaagttccagtacatttgcgtttaatgaaaaattcatctgattaaaacaccatttatcaaaatctattttatttacattatagctatgaagattacttctaatatttaagttcttatctgttttatattgttccctaaccctactttccatattagttacttttatgatatcaatcaaattacttgcatctagaaaaccatttttctttgctgtattttgtgctttattaaaaacatcaattacagcctcaatatgtttcttcttttcttccaaggctttcttttgaatacttatcatattctctaggttttctccactttcatgtaatatatgacttatttcatttagcgacaacccaatgaattttaaggttgtaatctgctgaagctttaataggtcttcttcacagtaaattctatatccagaatcagttttttcactaggcttaagtaatccaattttgtcataatgaagtaatgttttcactgtcactcctgattttttagcaaattcaccaattttcaattcatttccctccataacattattctaatccattaccttagggtatagtcaactctaattttaaagagacactatctttcatgacctttccaataaattttaattaatattattaaccattttatacgttatactcttattttttcccatataattccgataaaataattgaaggaggaataattaacaatgagtagtataactataaattcaaatcgaatcaatttattcaaaaatattaatatcaattcaactgatgacaaaaacaaaaatgttgttaatggtaattctagtattactaataaacaagataaaaaagaaagcggtttaatgcaaaatcttctaaagcaaaaacaagaacttaaagaagaaaaacaagcattgatagctaaagaaatggacgcaaaagagaaaaaagctaaaatggatgaactaaatcaaaaaataaaggatgttgattctcagattcaacagctaaagattcaagaaaaacaagaagaacttcaaaagaaacaagatgaaatttcaaagaaaaaagctaaagaggaaacacctaacaaagacgataataaaacaaaagacgatgtaataatttctgctagcttaggtgaacttattaagattagcggctcacaaaaaactatacatttactaaaggatagtaaaaacaggcaaaaagtagaagctgaatatatcaaaccaaataatatcgaaaacagctacgataataatcgtttatcgcaaataggcgcaagcatagccaatataaacatgaccatttataaaaagattggagacataaataaaagtgctgaacgcattcaagctaaaacagaattagcgcttaaacaaatcaaagataaagatgacaataagttaaatgaagaaacaaaggacatagataataatactaataaattagataaaagttcaaaagataaagccaatagtaaattagatacggaacctaataataattcatataataaaactaccgaaactatagtttagcttctaaaaaacatattaaaatattctatcagattcaaaaaaatataagacagcccgcctcattgtatgggctgttttatatttgtaagaataattataataattctttaactacttttataacttcttttgctatatattcagcatcttctaaagataatgtagtatatactggaagtgtgatctcattttcatattgtgcataggcattaggataatctttaatatcatatccaaggtttttatatagagttagcataggaagcggtttgtaatgaacgtttgttgctattcctctatctgctaacttttgaatagcttcgtttctctttttctcatcaaatcctttaactctataaaggtataaatgatatgatgtctcagttccattctcatcttttgtaaatggaattattgaaaattcttcttttgataaaatatcactatatatcttaaatatttgtcttctcttttccaacattttctcatatctttttaattgaactaaacctatggctgcccctatatctgtcaaattacacttaagtccatcatttataatgtcatattcccatgcacctgcttttaacttacttagagcatcctttgattgtccatgcatagcagtaaatctcatatatttaagtaaatcctcatgatcaccaaagtggttgtcattaaatgtaacggctccaccttctcctgtagttagatttttaactgcatgaaacgaaaatgagtgaaaatcacattgagatccaactggttctcccttatatttagcaccaaaagagtgcgctgaatcgcaaagtattataatatcttctctatttttatccttcaaaactttctttaaagcatcataatcaaacggtactcctgcaatatccactggcataattacctttgttttatctgtaatcttatcagcaattttatctatatccatttcgaaagtatcttttttaacatcaacatatataggtttaatccctctatgaataccaacgcttgaagtagcagtatatgtatatggagtagaaataatttcatccccctcttttatatcaaatactttaagcactagttccattgcagcagtcgcactatttaatgctaatgctttattaacatttagataattttgtattccttcctcaaactctgcaagtttgggtccagaagtaatccaacctgatcttaatacattacctactgcttctatttcttcttctgttatatctggtggtgaaaatggtatctttttcatacaattcatcctctctaatttaagcacaaaattttaatatatatgttgcaatccataatgcacatttcacaattcacaattacggctaaaattctttcagtatttttagaattatgaggaataattatttttgtaacatatatataatagaatctataaaagtaatttataggaaataacttttatattagactctcttttatattattataaactccacccttaggtaagagtcaagttaaaaatatttatcttagaataataaataaaccaccattttcagctagtctatttataaactagttttttctaaaaataggtggttgtttaattaaaaagccatttctacatgcaataataacttttaactatttattatctctgtttttcatggaactacctaattataattcaacaattactggtaatatcattggctttctcttcatttttgtataaacataattgtcaacttctcttcttattccattctttatttccgcccattgagttatgtttctatctaagcatttttctacaacgttagtaactatatttctaacttcgtctattaattcttcagagtttcttacatatacgaaacctcttgacactatgtctggaccggatattataattttatttcttatgtctatagctataaccactgtgattataccattctctgctagattctttctatccctaagaaccatacttcctatatctccaacccccataccatctacaagaactcttccaaatggcacttttcctgatacttttccagtagctctagttaattcaaaaacatcaccattttctaaaataaatgtcttagatttatctactcccatactttctgctattttagcatgagtaattaaatgcttatactcaccatgaactggtataaaaaattttggttttaataaagcttgaattagccttaattcttgttcacaggcatgcccagaaacatgtatatcctctattgatttatagattacattggcgcctttctttattaaatcatttattaagttagatactgccttctcattgccaggtataggacttgccgagataataaccatatctccttctattatttgtatatgcctatgtgttgatgcagctattcttgataatcctgccatagattctccctgacttccagttgtaacaatagttaacttatcatctggataattctttatttcatctagacttattatcatatcttctggaataagtaaatatccgagttccatagcaacttcagatatattttccatgcttctaccgctaaaagctatttttctgttatattttattgaacaatcactaatttgttgtaatctatgaacatttgatgcaaatgtagatactataatcctaccagtagccctactgaaaagattctctagtgtttctccaactgttttttctgacattgtgtagcctttatgaagagcattagtgctatctgccattaagagaagtacacctttcttccccaactgagcatatctttgcagatccataaccttcccatctattggtgtgaaatccactttaaaatcaccgctatgaacaataactcctattggggtatgcaatgcaatagaacagctatcaggtatactgtggttatttcttatatattcaatttttatttgctctaattttattagttctcccggttcaacaacatttaatgtacagtcactaagcatagtatgctcttttaatttaccttctattaatccaagtgttaatctagttccatatataggaacattaatttgctttaatacatatggtagtcctccaatgtgatcttcatgtccatgggtgataaagatccccttaactttattcttatttttaatcagatatgttacatctggaattactatatcaattccatataggtcttcatctgggaatgctaatccacaatctataactattatctcattatcgtattcaaaagcagtcatattttttcctatttcaccaagtccacctaatggaattatcttaagtggaatttgtttagattttgtttttttattgattttattttcactaattccaatttcattattctccatatcatcacacctcaaaagtttttattctatactttaattatttgcaattaactttaaatatataagtacactttaaaatttattttaacctaaaaagtagcattataatttcaaaattataatgctactttctatagttatattcgtctttaaatatcattagatcatttcgatattaatcccataaattatattaatatatagaatatgcatggaataatatcttaatatttttactgaaaatacattgcttttaatttatcagctatttcattttcacaacttgatatttgtctaattccatatccaagaagcaatggtgaactactgaatcttggcatgaccttacataaaattttattttttatatgataaaaaaatatattaaagctatcacacttcacaaaataattatttaaaaggtaatgaactacctttctaagattatatgccaactcatttaatgcatataaatcatcatttataattatattaaattcagtaaatccattaaatggtttatgtgatagattaactaaacaattatcacttttatgaatttctattccttcaaaataatcatcttttatatttaatttataatcaatatcatcaagacctactatctgcatatgaggatgttttaagcttccgccagaatttggaccatgatttttataaaatattactgatttatattctccgcttgcctctattcttagccaatgtttaacactaaatcttattaaatcctccatatactctgcagaatactgtcccatatcagtattacaattatacgtttctataataactaattgataagtatcttttatagttggatacttattttttagtaatacaaatggcccgtcttcatcaataacatctgtaagtgtctctctattgcaaaacggacattcctttatatttatttttttaaattcatttggcttatccttattaatttcatttaaaaatactaaatacttatcgtttcccatttatatcaccaaaaaccttccatcaaaatcattttttaattaatacatgtgcacactttgaaggaacagttatactattaccttctatcgcgtaaatttcatctactccagctctttccttattaacaaggacactccatccacattcttttaaatctataaatgcttcctcatcatttgggttaaatattacaactatagtattacacaagtttttctcactgttatcttctatcttatatgctacaacattttctttgtaaaaatcctctccatactctaaaaatgttaaattctttctaatttcttcgcttgaattcattctgaacgctttatatttctttcttaatttaattagacctttatagtaatttacaatttctttatattcaaaaactctatcccactctaaattatttacgctatcaggagcattataactatcatgactaaagcttccatcatcatttttcttagtccttaaaaattcttctcccgcttgaaagaaaggtatcccttgagatgttaaaactatagccgctgctaacttgttcatattcttacgtttttcttgagaagactcattgttagttaaatatagtttatcccataatgtataattatcatgagccgaaatgtaatttatacattgataaggctcatttgcccatgcaaagcgtgagtatatgactttatcatagttaatgccttgtttaccagtagctcctacaatgcagaatttaatactttcttcaagccctgttctaccatttacatatcctttttcatttatattaaacacatgtcctttaactgaatctctagtatcatcactaaatgctgcaatttgcattttatcaaatttcactatattttgctttactgatgactcttcaccacttaatggagtccagcctccagtccaaccttcaccatacataagtatagatgtatcaatcttatctaactcagctctaatttgcttcatagtctcaatatcatgtaaacccattaaatcaaatctaaatccatctatatgatattccttagcccaataaattactgaatcaacaataagttttcttaccatatatcgttctgaagctaattcattgccacaaccagatccatttgaaaaatttccattttgatcctgtctataataatatcctggtactgccagattaagattagattcatgacttttataggtgtgattataaaccatatccataacaactctaagtccagcttcatgtatacttttaaccatttccttaaattctctaattctcttttctccattaaaaggatttgttgaatacgatccctctggcgcaaaataattctttggatcatatccccaattatattgtggcatatctggtttactttcgtcaacagtttcataatcaaatgccggaagtaaatgaacatgagttattcccaattccattaaataatctattcctgtctttgtatattttcctggaattgtagtcccatgctcacaaaacccggtatactttccttttttatttgagcttattcctgaattctcatttattgaaaaatctcttacatgaacctcgtatattacagctgccgttgcggagcttagctctggttttctatcttcctcaaaatttattggatctgtttttttaagatctattaccattcctctgtttccattaaccccaagggcttttgcatatggatctacaacttctctttcatttccactattaattattaagtaattataaaattcaccttcaagatctcttttcacctctatgttccaagttccttgtactcctcgattcatgtctaatatttcttctggtgcatttgtataattcttttcatcctttccaaacagcgccagtcgaacattatttgcatttggtgcccaaactataaattttgtaccatctttacaatattctgcaccaagattcccatcatagttattgtactcattatctaataaattcattatattattaccccttttactagttttattaaatgtttttcatgtaaataatatttaccctatccatatattcttaaattctagcagattatctccatgttactttcttaattctgttattattttacccgaaaatgctgggaccactatgcttgtttcattagcattaatcactatttcattttcatctaataaatcaatacctttttcgaagggtaatttaaattctaaaacactttctttatcagataaatttaatattacaaaaactctatcattatcagtatttctagaaaatatgaattgttcattcttaacaaccacttgttcataatccccatattttaaagcttcactattaattctaatattacctaactttttaattaattcaaataacttatcatcttgttcatctatttttccaaattctaattctggtcttaaaggtaagtctgtaccatttcctttaactcccttaagaccatattcactcccataatatacacttggcacaccaggcattgtataaagcaatatatatgaattatatatatattctggtttttttagtgtacttgctagtctgttaacatcatgattatcaacgaagttatatagacataaatttttataaattccacctgtgccaaataatctatttaatgaatatgcaatttcaaagtagttcttatcattatgacttgaataaattcccttatagcattcataatttgtcacagaatctagactttcagtatttgcccatctgttataatctccatgaataacttcgcccattaaccaaaaatccttcttctttccttctacaaatctctttaaaactttaaaaaactcaaaatcaatgctatcagctgcatctaatcttaacccatctatattaaattcatctatccatgtacttacagcctgtagcaaatgatttataacttcttcatttttcaaattaagtttgactaaatcataacagccattccagctttgataattaaattcatcccccattggacttttgctattgaaatttaaatctgcaaaccagctacaatacttagaatttactccgtttatctgaacatctttaaatgcccaaaattctcttcctacatgattaaataccccatctaagattattcttatatcattcttgtgtaactgctcacatacttctttaaaatccgcattagttccaagtctttcatcaactttgtagtaatccttggtatcataaccatgataactcgactgaaaaattggtgaaaaataaacagcattaattctcatttcttttaaatgaggtatccatttttcaattttgtttaacctattttttttatcatatactttacctggttctaaaacaccacaaaatccaagtgtatagaattgataaaatatactttccctaatccataaattcataatctcatcccctttggtttatatacattataccactttgacgccatttttttacaccactagtttataaataataaacctgatttttagacgcccttatatttatcaccttcctaattatataaaaactctccataattagaaatacatattggaagtttatatattttatttctataataagaaaatttatataaatattattatcatttttgtcacatactagatattgaaattaaatatctacggaggtataaaaatgaatacaaaagctataaaatacataacaactttcttattggcaataaattgcctaacatttcttcctaaaccaacagttgcaagtgcagcttcttactcacttggcggcttaaagatttcaacttactatgctcataaagataaatctaatggttttaatgtgtttggagaggaaaattataaatatctttctgccgaacaaaaaaaggaattgcttgaattaaaaaaatgtaaaaataaaggtcaggatctttcagaagagcaacagaaaactctacattcacttatagattccatcatcaaaggaaaactcggagataaggactatgtagattttaaaagtttagttgaaaaaaaacgttctaatgagaatttaacagatgaagaaaatgaacgattaaaggattatacggatattattaatggtaacaaactttcaacgaaagatatacttagtcaatttctaagataaattgtatctcatgcttataaaagaacaaactctaatcgataggatttgttcttttaacgttatattattattaaatgctattttcgtagaatgacaacaccctattaaagaaagaaaaagctatttcatctctttcaaaatacgattcatgtttagagcctttcatataaaccaccttacaatctttagcatgatgcgcaaacctattctgtgcttttgggataacatgtgtatcatattcagcttgaaataatagtattggtaccattatttttgatatattctttcttctaattagttctttagttgcttttaaactttcgatataccataaagccgatgatccaccactatgataattatcattctttttaatcttttccaaaagatattgatatcgctccttacaactagtcgatctactgtaaaaatccttcttttcagcatatggcttctggcctggaagatatgaatttccttttccgcaaaccctcattgctttagaaataatatttgctaaaatcttaggtgctttcccagtattaatttcatgcattggtgaacttaacactgcagcattaaaataactattatatttctctaaaaaaacagtacctatacatcctcccatagaatgtgcaaataataacaacttcttattcctactatctggaataacaatttcatctataaactttttgaaatcttctacatagtaatcaaagttttcaacattaatctgataattatccatcccaagtctttgtgatctaccatgccctctatgttcaagaataaaaacagagtagttttcctttataaaataataaattagttcattgtatttttcagtaaattctccaaatccatgacaaatgactatattagcttttggcttctttacaatgaatttttcgtaataaagttttaagtcatttgctcctagaatatagccactttctagattcttctttagataaggttcaactatatttatcattttttccttataattatcttgtgaaatatatatttcaagatacttatccttaaaatttgagtatgaagatgccgttaatgctaagttatcttcattcataatcttcccctccctacctataaattttggaatcaaaatttatcttaactattaatataaattacttattttaaatccattat

SEQ ID NO: 130 - DNA, 13819 bp, Clostridium beijerinckii
atatggagtattataataattatagatatcagtggggacttaaaaagctggctcctgtacaatacagaaaccagctcatagctgcctagcctttttcaaaatgtccttgacataggaaccattttattttatacctagctatactttttatttaatttccaaaaaacataataattttcatcaatcacactatattttcaccgcaagcaatatattattcatatataaataccatttttcatatgctaccctcaatatattaataaccatataacattgaatagaattatcccatttaaatttttaatataagattatcaaatcaaactaacaaatacaatttgacatcatgcttatgattgtatttacgcgtattacgtctattcatcatatcaaatataattttttcctccgtaatgtttacttgattaatatcttttactacactctcatttattccattaatttcctcataaattgaaggacaaattctacaatttaaattttttctcaactcttttttatcttgttctaaaattccccgcataattttacaccctcttataaatattcttttttcaatcaaaataaatctaatactttaaaactaacggattatcattttcattaaataaagcttcatgcattgaagcaaacattacattcttttgatattgatcagcaaaaaaatttataacttcaatatcttcatctgataatttacttctaatgaccatcacttcattatagttagttttttctagtaattgaacaatatctctcgcgtatgtacttttcatctttatgcctcccataacccctcttttttagtattacgtatccgttttcgtccatatattatttttcccaaaatcatcaacccacttttaacattttctaattaagaaattaacaattctcctctaatatataatcatatgtaaaaataaatatatattaagaacatagtataaaaagttaatttaactcatatattgacatttatccttatattggattagaattatctaaatatataaattaaaatcaataaataagtttaataaaaaacgcaaggtataaaaacatattaaatttataattttaaattaattagctcaaagcttaattctactaaaaatctttttatataaactagtattttttgcttatgtagtactgattaataaggtgattcaatttaatgctaatgcaaattatctcatcatttctacaaatatctccttcaccaactagtttgtttagatgctctctaacagattcaattttaacttccaattcttccataataccctcctaatagcattttattgattttataccctaatttaatagtactctttttataattctctggtaacatttttttgcaaatagttcataatttaattcaaatagctactttcattatattacttaagaatgtacagttatataaaaagagaaataaattaaatgatattgatttcacagatattagaaaacgtataaaaaactaagaggaaacttaacggaataactaaagattatttttaaataagttgatgaaacagcttatttaagctaacttaaattgggacaacatcatttagattttctgcttcaattagaatttcccaagttaaatattcctttattcttttaatttcttcaaaagcacatgtattttagttagtgtgcttaatagtatttttgtgagaaaactatatgttttaattttcataaacgaactcaaatagctttttttgttatttgcctttaaaatataaagttatataaaaaaaggaatgataaacttgaataatattaattatatagatatcggaaaacgtataaaggctgaaagagaacgcaacggcttaactagagaaaagttttcagaattggttagtatatctccaacttatttaagccagattgaattgggacaacgtcacccgtcgcttccaactacaattaagattgcttcaactctacatatttctttggactttttagtttacggcgaaagagcccttaatgttaataaagatgacttgatagatataataaatcatgctcacgagaaagatttatatgtactaaaagagattcttaccgctattcttccatccgtaaaatattaatcaagagtatatttttatacttctgtgcgcaaaaagtagacagttagaattaactgcctacttttttgtaatagtttaaactctctcaaaatataagtttcaaatcccaacttgataattatcttttttagaatgatattgatatttatttaacaattcacttcctaattctaaatgcacatttttatgtatacatagagaagtatcatgtacgcaaagaatacttgaattaaacttttcattatatcgattccaataatcttcctgctgtaaaaaatatttttgcaaagaagattgaattatccatctatttttatcatatcccttattttcaatcatttttatttcttcactaaaactaattgaattactcttattacgaataatttttttcatgtcttctatacatataaattgcaccttttcaatagaaattccattaattataagtaaattttttaatttcttgtagagatttttctgaatagaaatatgaactttttcactatttcttataccttcttctatataatcatacaaattaataaacaaattgtagtccccataataatacacatctcgttgcttattacctacaacagtatttcttctgccagctttataaaacttaaaagcattacaatctatgcactcagcaaccaaatcaccaacatattgattcaaagcaattatctcatcatccaaaaaattacctttctttttaataatcatactatctaatctctgtctccatttttccacactacttcttaaataacactcattacacattcttctcattcccccaccctataataacattaaatacctttatatttttcaaattttaatgtttaatttttcctaattgatagatagattatttaattccagatatataattatttttccacattagacctcttaatgctttttttatatacaatacctttatttaatactactattattatagagcacttgcaatatattttttacaattagttcattttttaattcaattagctttttagggattagtttcaaaatttacgagttcttattaaaactaagttaatgccctaatcgaaaagtgcatttacatttgcaaaaaatagctatatgtaattaatccaaattacatatagctaaattgttcaaaaaatcaatttcatctaaaatattcttcacaaacgccattacattcaattattacatctcttaataaaagcatcaactgatcacaacccaaattactaatatttccctaaattcttccattaccttttttatttagttttcattcattgtccattacaagtttttttagcgttttttccatgctatagactgctttcattaataaatctttatcatcattttttgcagcattttctgcttgtaacgcaaattcagctatatcattgactcttacagtacctgctgacccttttagcttatgcagaagtatacatgattcatttaaatcatttttatctatacattctttaatttgactcagaattttctttgattgctcacaaaattcttcaagtaattctgtgcaaaaacgttcatcaaatcccgattcctctataagactttttactatttcagtaaaatactcactttgattcatctcaaaaccatggtcatttaaatcacttaaaatattcatatcatcattatgaatatttttcacatgcttttctaacatttccataacttgatcaacagtaaaaggtttgcttaaataatcgatcattcctgcttccaaacacttaatttcgtcatctttcatagaataagcagtcatagctattacagggacatttttataacttcttaacaaaagaatttttcttgttgcttcatagccatccataactggcatctgacaatccataaaaattatatcgtattccttgttctcacatgcttttaacgcttttgccccatcaatagcaatatcacaagtcaaaccatttaattttaaactattaacaaaaaattttatgtttatatcattgtcttctactaaaagtatttttatctttttattatatttagcttcttcaacattttgctttgttataaaaacatcattattatatattttagagccatctcctttaatcaccattgcaacgcaatcgagcaaatcacctcttttataaggttttgaaatatatccagaaaatttattttccttcgctatccttgcttcagaatttgcggtaactgaagttaatagtatcaaaggaatgtcatttattaagcctctttccttcattatttcaacaagctcaaaaccagttatctctttcatttggtaatcaatcaaaatagtgttgtatgccttccgattatttataagcatacttaatgccgactctaaactttccgcctcatcaatcatacacccaacctcttcaagataaacttttgctatataacgattcatctcataatcatcaataactaatattcgtttacctttaaatatagagtaatcaggaggcatttgaattactgattgttctgatttatctagtaataaatcaaaataaaaggtcgtccctttattttttacacttttcacacttatagtaccacccatcatctcaactatttttttgcatatcgcaaggcctaacccagtccctccatattttctagttgatgaagaatcagcctgactaaatggtttgaaaagcttacctatctcttccttattcatgcctatccctgtatctcttatttcaaaataaagctgtacttcagtgttcgtttcttttataacggaaacttcaataaatacttctccattgtgtgtaaatttgactgcattgctaactaaattgcttataatttgtctaattttagtaggatctcctaccaaacaacttggtatggctgaatttataagcatattaagttcaagccctttctctcttgcttttgcatcataaagaaatatggtgctttcaattacagaacggatatcaaaagcaactttctctatttccattctcccagcttcaattttagaaatatcaagtatatcatttataactacaagtaatgtttctgaagaagtttggattgtctcaacataatcttgctgggtactatctaggtcagttttttccaagatactcaaaaatccaacaattccattaagaggagttcttatttcatgactcatattggctaaaaattgactttttgccatattagcgtcttcagctgcttcttttgcaataatcagttcatttgttctttctttaactttttcttcaaggttatttataaacgagcacagttcttccgccatgctattaaaagccttagacaaacttcctatttcatcatttctaaaaaccttggccctctctgataaattacccttcgagaatttatcagatatctctatcaaatgatttattggtttcaatataattttagtactcttcatatgaataataacagctataataagagcaatcacagtaagctctatagctatattaatattattccttatttcttttgtaaaaatagtttctggaacagatgttattataagccagtccagaccatctttattatactcaaatattttagtatggtagttctcattattaacttccgaaataaaacttgtattagaagtatttatatagttttcatatgcatcattaattgatttatccgtaatattcttaactaaagttctattaatatttccatcagaaagtatttcaaaattagttttgtttaacgaattcgcaactagaaatccagaattcttttcaactatatatattgaagccgaattctcattggcgattttttccaacgattcattaagagtagaaagaactatatgagttcccattactccttgaatactcccatctttattataaataggatatgccgctgataaagccaaatcatcttttgtaaaatgtttataaacggaagaaaatactggctttccattttctttagcacttatataccaatctcttgttctaggatcgaaatcgccataatcattaacaaattttccctgctttaaattttcatctacattataatataaagaatgacctttggtttcaggtgtacttctatatatttctatatcgtcatttccattttttctagcaccatagtattcaccatcttctgtgccaaaactaaaactgtaaatctcatcactactatatttaactattcctgcaaaaaaagcatctctctgatctttgttatgcatgtctataactttgttttcaataaaagtgtggttaacctcattgttatatagaggtatgctaaatagcgattgtatttcattaaaaacatcctgattggaatcgtcttcaattttcatgatagtattgttcaccgaacttttccaattattaaatataatataggttataataccaacagttgtagccataagtgtaataaataatacacttattaaaagccttaatgaaccttttcttcctatcactgtatttccaattctgttaattataaatatcaccaccccaatttcttatataaatatgtagaattttaatagaaataaatgtaaacttatataaattattctttgaatcttattatatcatcgcactaatatttatacaatatttttaacatttcattattttttattgtaaaagtttatctcattaatttatttccattcttcaaataaacattcttaaaagcttatgtatttttttggcgaaatagatagcattgaattctaagtatcaacaagtgctttataaaaaaaaaaacaaaacgagatatgtttattttctaatttcaacacatctcgtttcaatcttcaatgatttacatttaatctaagcacagattggtatttagtcgttcgcatattgtctattaaaaatcgaagtatctatttctcaaatcttttataacctctatattagtgctataagttgccccctcatctctaatatccttagaattttcgtcatattctcctgagaaagacaataaattaaaacttgtctccatataatattgctcatcgcagattaaaagcttattatgagagttcaccttttttattttaaaattccctccataatatttaaatttatcttttagcctttctgctattatatcgctatttctattcttacttctattattactatcctttttaatgtgataaatagagctattttcttctataccatatatgattttgatagatcctcctcttgaaagtaaattttccatcatatttatcaaattattgttaaccacataattgttcatccatgggctcgcaatattaagttcatacttggcatcagaaaaagctttaataaatttatctcttatctctttattttgtaagtgatactcttcatatttgtttgtgatttcattcaatgttccatatatttctttatctaaaggttctatattttttattacatatttattttcttcataacttatatataaatcacatatattcttaatcctaaatttacttaacttatatgttttttctattgagatttcatccttatttaacagacctatagtttcttctatctgaataatactttctttcccaaaaaacattaatgcatttattgctttaccatcaatattcacattctcatatttaaaaaatcttcgagataaactttcttttttacagctgattacagagtttaaatcattagattttattagacaataatccatttcttttaattgatcatcatacttaagaaattcattttcatacttttccaattcttctttcttagctttaagctcttcaaactgtttttttgcagattctaatgttagcttctctgcttttttagattttttaaatttatatttaattaaatttttaaatttaatagtgttttttgtaaatatatctaataatgatattctattatcttttttattttcagaatataataaatcctccttcattcaaacacctcatttccttactattatggattacattctttatttatcctaattttacatactcaaattatgtacgtcaatctatattttaaagaaaaatatttttaagttttttttcaattttaggaggattttaaccaattatgtcaaattaataatactgagaacatttacttagtatatgttttaataatctaatggtaggattaaagggaggaataattatgaagaaattatttaaatgtagtgtgtgcggatttatatgtgaaggagtagaagctccagaaaagtgtccaaaatgtggagttcctaaagaaaaatttgtcgaattaactagtgaagaggctgataaaatctatcactctgatagaactaatgatattcatttagagatcattaacttagctgataaaattttcaaactttctagagaaggaatagacttaaatttagatcctacatgtgtaacagcttttgaaaaagctaaaaatagtgcttggactattaagcaaatatcaaaagcagaattagcagcgcatatgagcaaaggaaaatggtaaaatattaaaacgaaaattttttgttaattaaactattgtttaaaaagctgaaaatcctcagatttgatggattttcagctttattaaatatctatctagaattccaacagctttgtgattatttattttctacaaattgaatcttcaatccattaggatctaaaacataaaaaaacttagtattaggatttggctgaaatggtccactatgaatttctattcctttttccttaataaagtttattttctcatctatgcagtcaacttcaaatccaagagaaatatgctctccataacttacttcttttacttcctcatcacatattagttctattttagtctctccatctcctaaaaatacaatttcccttcctggtcctgcattaaatcttttattagtcttaagaccaacaatctcatgataaaacttcaatgattcttctagatttttaacttttaaagtactccaacaaaatttcataacttattcctcctaatatatatcacttatgtataaatgttatattttgcatttattttaatatttattaacctgtctattgctagcttttgaattgcatatgtattaaagtatgtcgctcctatatttaatcactagaaacatattaccaattaatttagcaaatttgtaaatccaagttcagtaaatatgtttttcattccctcttcatctatttgaagtttcaattgatctattgttatattattaagttcttctatatcacactttatagtggccaattgtttgcaaagcaaagctgcttttttcccgactattttttcatttgattcctcaactaactttgataacggggaacgtaatatgccaagatctttgaacattttttttacttctttttcaggtgaattttctataaaatcatatataccttccactgtttcaagttcttgaagtaatggtataacagacttttctccaactccatttattcccggaatattgtcagaagcatcaccttctatagcttttctatcaataatttggataggatctacaccataaaaatgatttacatactgtgtagtaaattcaaaaactccgctaggtatattaagttctttaatatttattccaagactttcgtacatatcggtacactttgaagttataagccatacccttacattatcatcaacaagttgaagacaatcttgatctttagtccaaatgctaactctcatagatcttccaaatttctttgccaaggtacctattatatcatccgcttcatactctttaaacacaaactctggaacattcatttcttttagaactttttgagctaatgcaaactggctacccagctcacttctcatatcctttctagtacctttatactctgaatataatttttttctaaaggtaaattctttagttaaatcccaagccacagcaatatgagtgggattttgatttttaatcattttaagcattgatgccatcattgtaaagaccccattagtaaactcgcctttaggtgattgacgtaatttttcaatatatttatccttctcttcatcagttttagcaaatctatattctcttggaagattaccaaaaaaacagcaagataaaagagatgaaccgtctattaataataaattgtcatgcataaataaaaactcctagcttttcttaagtttattctgattaatacctttttatattaaaacgactaaccataattattataccactattaatttacataaaaaatacagccaaactaatgactgcattttttagttccatattattgctataaaggtttatacataattacatatctatattaccatattttaatgccatattaaacatcattgcatatatttgttaaatattacaaacacatcaattaatttatctataaattattaattcacaatttttctttactgttatttattagattccttattatataattgcttactttctcttaaaattcatatattgctggctggaatattgcatttttgtcatttcttctaaaaaccacaattaatattttgattgtttttcttttactctcaataagttatctcacatgtacatatctataaacgcccttccattttgtaaatgttttacatttatgttataatttattagagcctattatgtctcattaaaaagcaccaacaaaggggagtggacaaatgctaagagtaaagaggctagtgtgcttattaagcatcattttaatacttgatacatatgatgtaagcacaataacaccatttaacgctttagcaacagatgttgtagaagataataatatagaaataacacataaagaaaaaacagaatttaaggaaaatcctatagatgaaataaataatgaaaaaattgagcaaagagaattgaccaaaaagaaggaagccgaagaaaaagaacaagaaaagagtgttacacctgaatggaaagactttatattaactttttatacatctcttgattcggaaaatagtagtgctggtccagtgacctgtcaaaataagccattaactccaggtggcgttgcaaataacgtaatacctctgaatacccaaatatatttggatggttatggacaagttactgttaatgataaaggttcagataagtattttggagtagataatagattagatgtatttgtacaacgagaacctggtgaaaacgatcatgactactttcgaagggtgaatagctacggagtacaaagagttcgaggttatatagttaaataaattacattggtaattacaccatttaaatcctagtaatgtatagataaacaatatacaacttaggcttatgcgtatgcctcaccgaaatcataaatattttgattccgaaaagctatgaaaatatcgctgaaggttctaagcagcagattgtatccaatttagcatgctccagctttcagtttgacaagctaaattggaacaacctacagctaagaacctttaacagctcattttcaaatgttttcttcacaaatatatttatgatttctagttaatacattagcttaaagttctagcaattttgtaaatatgttcatgtaataagttgaattcttaaattggctatccatacagataagccaattataagttagatttacactatcaaatatatcccaactagaaatggataatatacttttgtggaatgtttcattggtaattttgatagatgtgattctttagctataagttgttccaaatgtgctagttcaaagcttgttctttgaggctagcactttgggtgcaactttatagccttagaatcacccatcagaattacctggaaactggaacaaaagtatgttattcatttcggcgagttgtatgcataagttcaggtctttgttgggttatctataccaatacaattcataaatataaagttttgtttttgacttttgtcgtaataatcagatttaaaaaacttatctttatcgagcataccaatcagcacttaagaaatcatatttttctgtttaactttttctttcttaatcttatataagtcactattactccaacaaaacagataatggccgaacaaacatatacatacctcattccatacataaagacatcatctctaccctctatatatccaagtactttctctcccattttcatactcataaatgaatataaaagcattgtcgccatagcaacaccggatgattgtcccaaattccttacaaaagcgtttatacttcctgcaatccccaacttatcactagatgctgaagacataactagagaattattaggaggtaaaaacaatccatttccaattgcaataaagactatatatacaattaattggtacatattggagttttcatttaaagtcgccattaaacccattccaattcctatgagtatcaatcctaaaaatgtcagaaattctgaccctattttatctgatagataaccactaaaaggagaaataactgttattaatacaggcgagatcatcattatcattcccgcaaagcttggagtcattttcaaaacattttcgaggtaaaaaggctgtacaatattattactgttaattgatgcataacatatgaatgtgcataatattccaaccgtaaaaagtgaatttttaaataatgataaatctagaagtggatattttaactttccttctattcgtatgaatattataaatagaattatagctgcactaaaactaattctaatcatgttattatcgtaaccaacagtttgtccatttataagagaataaaataataatacgacacttataccaaaaattattgcaccaataaaatcaatgtcttctttcttttcatttgacttacgaggcaatactttaaaaccaattgctgttccaattattcctactggaatatttattagaaatatataatgccaacttaagtaagaaattaaaatacctcctaatggtggtccaatcattgtgccaagagctagaaatgttcccgatattccaagagctctccccctttcattagctggaaatacttgcgttattatcccttggttgtttgccatagccgcagatgctcctatcgcctgaactattctaaaaaataataggtacgtaaaattttttgataacgcacaaaataaagaacctatggtaaacaccaataaccctaaattaaatactatagactttccttttatgtcaccgagccttccaaacagtaatattgtactaactattgttataagatagcagattacgattaactgaatagaagacatagttactgaaaatatattcaccataacaggaagtgctacattaactattgtactatcaagggtccccataaatggaagcaaaaccacaacggccaatattatccatctattcttatatacatttttattgtatatttccattattaaaatcatcccttttcattaattctgttataaatatactttattataattttgagagtttctaatatactaaatgatatacataagtatattcttttggatatgttatatttatatattatacagaagtta

SEQ ID NO: 131 - DNA, 13729 bp, Clostridium beijerinckii
caaatatagaataacattattaaaggacattttaaaagtggttttataatattatttatttcattaattttattaaaaaggagatcttagtaatgaaattcttaaagagcgttttggtcattatacttattgctctttttttagggagtaatttatattttattaacttattaagggacaagaaagtagaaaaggaaccgataaaacctaagatagtgctgatttctcatataaagactaatccatattggcttgatataaaagctggcgcagaaagagctgctaaagaaagaggtgcagtggttgaatttttaggacctacaactgcaagtactgaagatgggctaaaactttttgatatggctacatcagcaaaggtgagtggtataataacatatgtacaagaagaaggacaatataaaaagaaaattaatagcgcaatggagaaaggtattccagtagttacaatagattcagatgaagaagatagcaatagaatagcctatgttggtacagataatgttttagctggacaagttgccggaaaggaaatggtcaagcaaataggaacgtctggaaatgtagcaatagtaatgggaggaaaaaatgtaaagaatcagaaagaaagggtagaaggctttacagaatatataaaatcgaattctaacttgaaaattgtagatacagattcatcggatgcgatgcttcttgaggcagaaatcataacaagaaaaatattaaatagaaatgataacataaatgctttattttgtacctcagctcttgacggaataggcgctgcaagagcagtaaaagatttaaattataaggatagggtaaaaattatatgttttgatgatttggatgatactttaagcaatattagaaatggactagtttcagcaacaatagtgcagaaaagtaatgaaatgggttatagggcagttaatattattatggacaaaattgaaggaaaatcaaataagttttcaaaatcactaatcgatgtgaatgtaattaataatagtaatatatggagctataagcgaggagatgataaaattgaaaactaagagtttaaatagtaaatttataatgtttgttatatgcttaattattcctatatgtatatgcaatataatatccctagcgatgagcaaaaaaatcgaggatgggtatgttaatatgcttaacaatatgctcattactaatgaaattaagcagcatgttgatagctctttagataattttaatcaatatatattgaatggaaccccgagtaaaaaagaaagttataataatgaggtgattcttgcaaaacaaaaaattggtaagcttaagaaaaattctgatgatgtaaatcaatatattttgagagatttagataatactgtagattcttatatagaaagttctaaaaatacaatatctgcgtatgaaaataaggagggatacattttttactatgatgattttgtagcagccaagaatattgcatcatattgtgatgcatatgcatctactttaatgcaaaattttctagaggctaatagtatagcatataaagaactaaatagaaatagcagcgtaatatatataggactagctacatatcttatattaattttagctttatgtgtagtttatgcattaacatttataagacatatatctaagggcttaaagggtatggttgaaatatcaaacaaagtatcaaaaggtcaatttgaatattatgaaggtaacaaaaccgacatttatgagttagatattttaacaaaaacatttaataccatgattacagatataaaaaatcttattagctcccttaatgggaagatcgtattagaaaaaaaattaaaagaggaggagatgaaaaatctaaaatatgagaatgctttaaaagaatttgatttaaaggtattacagtctcaaataaacccacatttcttatttaatactctaaattgtataaacgcgacagcaataatggaaaatgcgataaccacaagtaaattaattaaatcagtatctaatattttaagatattctttaagaagtatgagtacaaatgcactattagaagatgaaataaagattgtaaaggattatatttatattcaggagtgcaggtttgatgatagggtaaaatttaatctaagtacaaatatggatatgaaaaaagttaaagttcctggaatgacaatacaaccattagtagaaaatgcatttatacatgggattgaagggaaagaagatggtggatatataaatatatatattgatgaggaaaatggtgagtgtaatgttttaattgaagataatggtgttggcatttctaaagaagttttggataagattaataattataattatgatgcaaaacatacatggcatacaacaggccttggaataaatatagtagaaaagaggcttagatatttatataacaagaaaaatatgtttaaagtagaaagtgaagaaggcaaagggactaaagtttatttgaaaatacctataatgggggatgagaataatgatgaaaatattaattgctgatgatgaaaagtatgatagggagaccgttaaacatataataaaagagaattttttaggagagttagaaatatacgaagctaaaaatgggagagaagcaattgaactatctgaaagtatcagaccagatatagttattattgatataaaaatgccaggaattgatggaatacaggcattgaaagaaatgacagcaactttaccaaatttatatagcataattttgacagcatacgattattttgattttgcattagaagctgtaaaaataaatgtgaaagaatatcttctaaaaccgtttactaaggaagagattatagaaaaaattgctgtgggaattaaatgggtgaaaaaagaacaggagaaaagaaaaagtgaaattaaagataaagagaaaatatatactttattgcctgtgcttgaaaatcaattaagtgatctaataattaatgataaacttaaaggcgttgattatggaatgtatctgcaatgtttagatatgagttttatgaatagctatgcaatggttatttcaataaaagacaaatatgcttataaagatattagtagggttgaaagagatcaaattaggattaagataggagaatatgttaaagaatatataaacagaagatataaatgcataggaaattatgtattttatgaagaattaacgtattttatacaaatagataatgaggaaactgaagattttaaaagtttagaaattgaccttgcatttaatttgagaagagaaataaaaaagagatttaatatttcaataagagcaggtcttggagaaatatttgattcagtagagcaaattgtggaatcttatagacaagctatgaagtgtttagtatacaactcagacaatgtaaatattatttatattgatgatatagaaggaaaattgatgaatgatagtttttcaggtggtatatcaggggataccaagttaggtaaaaataaaaattcaaataaaataaagatgaaactatttgaaagtgtaaaacaatttattagagaaaatattgaaacagaattagaactagagaaggtagcaagcaattttggattaagtgtctattattttagtaggacatttaaagaagtaaccggcattaatttttcggaatatgtgaataaatgcagaatagatgttgcaaaggaattactttcaactggagaaatgaatgtgaaagaggtttgctacaaagtaggatacaatgatcctaattatttcagcaaagtatttaagaaatatgaaggtgtcagtcctgcaaattttaaaggaaatatggaagaaaagattttttaaaatcaattagcgaaagatatgttacttattattcaggaattttttaatttataaaaagcaatatattactaacaacatatcacaacaataaaaaagtccagactatttcttatatttagatattagtctggattttctttatgttttgaattatttactagtaaaaatttgctgtaaaaagatagcaatataagattataaattagcaaaccagtctatttgaaacgtttactataacggatataattaaaactgtaaaagagatctataattaaaaaaaaggggagaaaaagatgaaatctaaaaaaatgattaaattattaggtttggcactaagtggggtactaatattttcagcattgacaggatgtggagctaaaaaagatgcacaaacatctagcaatggaaataagaaaataaaaattggtgtaagtatggacgacctaagacttgaaagatggcagcatgataaggaaatctttgaagaagaagctaagaaacttggagcagatgttgttttccaatctgcaaatggggatgatccaacacaaatgtcacaagctgagaatcttatatctcaaggggtagatgtcttagttgtaataccacataacggtgaatcaatagcaccaattgtagaagaagctcaccaaaataaaataaaagtattggcttatgatagattgattacaaatagtgacttagattactatgtatcttttgataatgtaaaggttggagaattacaagctaaagctatcgtggataaaactccaaaaggaaattatttcatgatgggaggatctccaacagacaataatgcaaaattatttagacaaggacaaatgaacataataaaaccttatgtagataagggagatataaaactagtaggggatcaatgggtaaaagattggtcagcagaggaagcattaaagataatggaaaatgctttgacagcaaataataacaaaattgatgctgtagttgcatcaaatgatagtacagcaggtggtgctattcaagcattacaagcacaaagcttagcaggaaaaattacaatctctggacaagatgcagatttagctggttgccaaagagttgttgaaggaactcaaacaatgacaatatacaaacctataaaagatattgctgcaaaagcagctgaaatggctgtaaagatggctaagggtgaagatgttgaaacaggtggtactgtaactaacaatggtaaaaaagatgtcccttcagtattacttactccaatagcagttacagcagataacatgaaagatactgtaattaaagatggtttccaaaaatttgatgatgtatataaaaatgtaccagaagataaaagaccaagcaaataaataagaatattggagtctgaagatattgtgtcagactccaatatagaaaggagataagcatttcatgagtgagtatattttagaaatgagagatatagtcaaagaattctttggagtaaaggcattagatggagtaactttaaaagttaaaaaaggagaaatccatgctctttgtggtgaaaatggagctggaaaatccacactgatgaaagttttgagcggagagcatcctgctgggtcttactctggaaaaataatttttgaaggaaaagaattaagccaaacaagtataaaagattctgaaagcgttggtattgcaattattcatcaggaattagcacttataaaacaattatctatagcagaaaatatttttttaggaaatgaaattggcgcacgtggactagtaaattttagtgaacagttaaataagacaaatgaattattaaatagggttaagctgaatgttaatccgcttactagagcgggggatcttggaattggacatcagcaattagttgaaattgcaaaagctctatctaaaaatgcaaaactattgattcttgacgaaccttctgcctctttaagcgaaggtgaagtagaagtgttaatgggaatattagatgatttaagaagagatggagtaacatgtatttatatttctcacaaacttaatgaggttacaagaatatgtgacaatgttactgtaattagagatggctcaacaataggacaagttcctattagtgagatagatcaagataagctagtacaaatgatggttggaagagaaatgaaaaatctattccctagagaagaacataaaataggtgaagaattttttgagataaagaattttaacgttttagatccatttaataagaacataaaaagagtaaaaaatgcgagttttaccttaagacgtggggagatacttggaatttcaggcttagtaggttcaggtagaacagaaatggtggcaagcatatatggaagtttccaaggtcaaaagagcggtgaagtatattttgagggtaaaaaaattgacataaaaaatccaaatgatgctttaagcaaaggaatagctatggttccagaagatagaaaaaaagatggaataattgcgggtatgagtgtagctaaaaatatgacaatgagtaatttagtgaaatataaaaggccattaaacgtaatagataaagataaggaaatgatggatgttttaaaatttattgatgaaataaaaataaagactgcatcaactgaattagcaataaaaaatctaagtggtggaaatcaacaaaaagtaatactagcaaaaaatcttcttgctgaacctaaaatattaatattagatgaacctactagaggaattgatgttggagctaagtatgaaatttataagttaatatttaagctagctaaacaaggaatatctataataatggtttcatcagaacttccagaagtacttggaattagtgatagggttctagtaatgaatgaaggggaaataaaggcaagtcttgagaataatgggttaactcaggagatgatcatgaattattctgtaggaaagaaaaatgaagaagttagtgagagttatagcgaagaaactaaaacttctgtaggaggaatataagatgcaattaagtaaaagtacaagttcagaaaaagaaaagaaattaggtttaggggttatatttaaatctaagatggcagcaatattaatagcaacagcagcaatatgggttttgttcacgtttttaacagatggaaattttttgacaacaagaaatttatcaaatttatttagacaaatgtcaattactggtgtacttgcaataggcatggtttttgtaatcattttaggtgaaatagatctttcagcaggatcaactttaggtttacttggaggaattgcagcaatattaaatgtttggtttggtttttcagctatcccaacagtggtaataacattaatacttggagttattatgggagcttggaatggatattggatagcctttagaaatgtgccatcatttatagttactttagcaagtatgcttgtttttagaggtgtattaataggaattacaggtggtaatactgttgcaccattaacagcagatttcaaagctataggacaagcgtatttaccaacagttgtaggttatatattagtagtgctagcaattgtaggttcagcatatttaatattaggaaatagaaagaataagattaaatataatattgaagttagaccaatggctttagatgtacttacaatagtaggaattggagttatatcattagttctagtgttaattcttaatgactatcaaggatttcctataccagttttcattatgttacttttagctttaatattagcatttgtaggaacaaagactatatttggtagaagaatatatggaattggtggaaatagagatgcagcaagattatctggtataaacgtaaaaaaacatattattgttatatattcagtacttggattactttgcgcagttgctggaatattacttacatcaagattaaatgcaggatcagtttcagctggtcaaaatgcagaaatggatgcaattgcatcatgtgttatcggaggagcaagtttagcaggtggtagtggtacagttgctggagcattagttggtgcacttgtaatggctagtatagataacggtatgagtatgatgaatactccaacattctggcaatacatcgttaaaggtttaatattactaatagcagtatggatggatatatcatctaaaaacaagaaataattctttgaaaatgattatataatcttaattaaaactttatataaattagtgacgaaaaatcatttgaataacagcaggctataattaatattgtctgctgttatctgtatatatggtatattaattctatattttgtttaacataaaaaggtatgaaacggacataattataatgaattaatttattaaaaaataacataaaaatgtactcagaaaactattgactatataaaaaaaagaaagtattataagcttataaaacaacatttaaaaagttatttcaaaatatattttaagtagtgaatatcaaaagaataagtactttgacttactttaataattattttgattaaagcttgttatacaaaataaaattcagaatattcattaaaatcaaacaaatttgatttatatataagggctagttattactaacgttggcttttataaatagatagataaatggcttaataagttattacgctatttactagaaataatttatattcaatatagaaaaatgaggagggtatcatatgagagaatactttgaaaatgtttcgaaaataaattacgagggggcaaattctaaaaatccatattcatttaaatattataatccagacgaaattattggggataaagcaatgaaagaacatttaagatttgccttatcttattggcacacattaacagctacaggagcagatccatttggtgttgggactatgattcgtccatgggacagcgaaactaatgaaatggatttagctaaagcaagaatggaagcagcatttgaattaatggataagctaaacatagaatatttctgcttccatgatagagatatagcaccagaaggaaaaacattacaagaaactaataaaaatttagatgagatagttgcgttgtgtaaaagtttaatgaaaaagtataataaaaaacttttatggggaacagctaactgttttactaatccaaggtatgttcatggtgcaggtactagctgtaatgcggatgtatttgcttatgcagcagcacaaattaaaaaagcaattgaaataacaaaggagctagatggagaaaactatgttttttggggtggacgtgaaggatatgaaactctattaaatacagatatgggcttagaattagataactttgctagattacttcaaatggctgttgattatgctaaagaaataggatttacaggacaatttttaatagagccaaagccaaaggaaccaacaaagcaccaatatgattttgatacagcaacagttttaggattccttaaaaattataaccttgataagtattttaaagttaacattgaagcaaatcatgctactttggcacaacacacattccaacatgaacttcattttgcaagaatcaataatttcttaggcagcatagatgctaatcaaggagatccgttacttggatgggatacagatcagttcccaacaaatatatatgatgctacattagctatgtatgaaatccttaaaaatggagggattgcaccaggtggtgttaactttgattctaaagttagaagggcatcatttgaaaaagaagatttattcttagcttatatagcaggaatggatacatttgctaaaggattgagagtagcttataaacttttagaaaatggtgatttagaagactttataaaagaaaaatattcaagctttacacaaggaataggtaaagaaattgttgaaggaaaagttggctttaaagaattagaagcatatgcgttaaacaataaccctataataaataaatctggaagacaagagttgttagaatctatagttaatcaatatatatttgaggatcataaataaataatatatcatatagatttattcatctcaccaaaataagaagcatgcttttattccgacttgtacgggattttatggatgattctaagattagaagttgtatccaaaggctagccttaaaggtaagctctatgtaaatacatttgaaaaaacttctaacttgtaaatttatagttaaaagaacttcttgtaatattttttagtattattattgcaagaagttcctttttatttgagactctatttgactagatattttataataagtgtaactttctaaatacaaaaataactagtaaaataaaaaatgaaaatgtattcaaaaaactattgaccgcgatgaaaaagggaagtataataaacttattaaaatacatttaaaaagttatttaaaaaaatgagtaaaaagtttgtaattatgttaatttagaaaagatatataacttaggaggtttattaatgagatatttattaggattggatattggaacatcaggaacaaagacagctctttttgatgaaaatggaactacaataaaaactgcaacttatggatatgatttattccaaccacaggtaggatgggcagaacaagatccagaagattggtggcaggcatgtgtaaagggaataaaagatgttattgaaaaaagtggtgtacaagcttctgatattaaaggtattggattaagtggccaaatgcatgggcttgttatggtagataaagatcttaatgtaattagaaattctataatctggtgtgatcaaagaacagaaaaagaatgtgattacatgacagaagtaatcggaaaagaaagactaattaagatcactggtaatcctgcattaactggatttactctttcaaaattattgtgggttagaaataatgaaccagaaaactataataaaatttacaaaatacttcttccaaaagattatattagacttaaattgactaatgtttttgcaacagaagtttcagatgctagtggtatgcaaatgttagatataaatactagaaactggagcgaagaattacttaatgagttaaatatagataaaaacatattagcagatgtttatgaatcagtagttgttagtggaaaagttacagaggaagttgcaaaattaacaaacttagcagtagatacaccagttgttggcggtgctggagaccaagcagcaggagcaataggaaatggaatagtaagagaaggaataatatcaacaacaataggtacttcaggagtagtatttgcggcaactgatacacctagatttgataaagaaggaagagttcatactttgtgtcatgcagtaccaggtaagtggcatataatgggtgttactcaaggagctggtctatcattgaactggtttaaaagaacattctgcgctaaagaagttgaagaaagcgagaaattaggaagagatatctatgatttattaactgaaaaagcagcaaaatcaaaacctggttctaatggaattgtttacttaccatatcttatgggagaaagaacacctcatatagaccctaatgtaaaaggtgcatttttaggagtatcactaataaataaccatgatgattttgtacgtagtatattagaaggtgttagctttagtttgaaaaactgccttgatttaatcgaagacatgaatgtaaacattgatgaaataagagtaagtggcggtggagcagaaagtgctgtatggagacaaatattagctgatattttccaatattcattaactacagttaaagcatctgaaggtggtgcgcttggagttgcaatactagcaggggttggagcaggaatctatgattctgtagaagatgcttgtgatagaatcgtaaaaggaaacaagaaagtttctccaaatgaagaattaaaagaagtatactcaaaagtatatgaaacatataattcagcttatccaagaataaaagatatttaaatatattaaagatataaatcaatcatcttagttaagtaattgtataattaattaagggtgtgtagtagtatcgaattttagcaaaaaaatcatatagttttttaaatactttaacaaaaataataatagtgatattatttaagaaaaagctactattactgataatagtcgagaggagtattttaaagtttgatagaagtaaatcacagtaaaataaaagaaactaacagaaaaaagataatagcattattattaaagaaaaatgagatcaccaaattagatatatctagaatattagatataagtataacaacagtttctacaaatattacagaattgaaaagcgaaggtattgtagaagatgtaagatcgttggaatctacaggaggaagaaaagcaattgctattaagttgaatgaaaactgtagatattcaattggagtagcactaacaccgaatcatataaagatatcattagtaaatataaagaaaaaagttattgaaagtatgcgagttagacataatagtgatggaatagagaacataataaatttacttaatgaaaatatagatttgttaatgaagaaatataatttatgctctgcaaatttattaggaatagggatttcattacctggaaccgtagattttaaagaaggcataataaagtattcatatttgttaggcgccaaagattttaatttaaaggaaaagttcgaatacttagacattccagtatatgtagataatgaagcaaatttatctgcttactacgagtttttaaataaaagagatatactaagaaatctattatatgtatcaataacagaaggtttaggcctcggtataataataaatggaaaaatttacagaggtgacaataactcatcaggagaattaggtcatactaagatagcaattgatggaaaaaaatgtaagtgtggagctagaggctgtttagaagcatacacatctatgaattctctgattgatagttataatgaagctaatagttcaaatattagtgatattgatgaatttgaagaaagatataatcaaaatgacaaagatgctcatgatgtattaaatgattatttaaaaacattgtctttaggtctatcgaatttggttatgatatttgatcctagcagcatagtaataggtggagatataaataatttacttaatgataagatagatatgctaaaaaaagaggtttataaagataacttatttacaaatgaaaataattgcagtataagtattgcaagttttaaagaatcttatctactaggagctgctatgatgcctatagaagaattcttagaaattaaataatggagtggtgaaagctgctctattaatttaaaaacttattaaataaatttttaaaatatatttttaaagttatgtaagcatagctatattaaggggagtcttaatctttgattggaactccagattaagacaagccttttatataaaactaaatatctatttatttcatattagatttatgttcttgatttttgattggaactccgaattaagagcaaatttcttatgtgttattaaataaatatttacataaaggtgagtcttaagtaagaaattaaaatttcttatttgagataaccttatatattaaatgatttttaattaaacaaagaggagatgttaataaaatgagatttttcttagacacagcaaatgtggaacacattaaagaagcaaatgaaatgggagtaatatgtggtgtaacaacaaatccatcattaatagcaaaagaaggaagagacttcaatgaagtaataaaagaaattacagaaatagttgatggac

SEQ ID NO: 132 - DNA, 13579 bp, Clostridium beijerinckii
atattaattcaaccttagctcaagaatattaaatataaatttattattgtaatatatattataaatggaggaattatgtggaaactagttatcgctgatgacgagcctaaaattagaaggggtattgagaatattttaaattggagtgagttcggtattgagatagtagggcaagcagaggatggagaaattgcattagaaattattaaagaaaacagacctgatattatattattggatataaatatgccattcttaaacggtttagacctattgcaaaagctaaaagagattggcaataatgggattgttattataataagtggatatgatgatttttcatacgctcaaaaagcattgcagttcaatgttttcgattacattctaaaacctgtgagtaaaaagaacatagaggagatagtaattaaagtaaccaaaaaacttattgaaaggggaaaagaaaacaattacttagaatgggtaaaaagacaattagctgaaaataaggaagtattacaaaaaactttttttagcgaatggtttaacaataaattaagtgatgaacaagttttaaaggagatgagtttttttgatatcgagtttggaagaaatattggaattatggttataaagattgtagaaaaacttaatgttgaagtaagtgttaggaattggagtgttgaattattagagtttgcaatagctaatattttaaatgatggatttaaagatttagagttaaagtatatttttaatgatgataagaaaaatataatactagtaagcaaaataaatgatatggggtggtggatttctattgcaaaaaaaatacagaaagagatatataaatatttaaagtgtaatgtattaattgagcaggcaagtgtttttaatgatgtatttaagataaaagatgaatatatgaagataatgaatagggttaatgaaaaaaagaagtgcagttctatggttttactagcaatcaagtatatagaagataactattattcaaatgagttaaatataaattatatatcaaataaattagaagtaacatcctcatatttaagtaaattattaaaaaaagaaactggattatcatttattgattaccttactaaaataagaatagaaaaagcgatgtatatcatggaggatccagctgttaaaatttatgatgtggcagaactagtcggctatagtaatcaacattatttttgtagagcttttaaaaaagtagttggagtttcaccaacggaatataagaggggaaaatagagtgaataataaaagaaaaattatttatttatctataattatagtttgtatatctggactaataatttttgcaatctatttatataggacaaactctcagaaaaaggatacatttataatcggtatgtctcaagcaaacctatatgaaccatggagaataagtatgaataaagaaatacaggaagaagctaagaaacatagcaatataaaaataatttttaaggatgcaggtggagatgttgaaaaacaaaaagaggatatagaagatttgatgaactttggcgcagatttactgattgtttcaattaataactccaaagaactaacaccaactgtaagaaaagcgtatgaatctttaccggttatattattggatagagctgttgatggatatgattatactttatatataggggctgatacaagatctataggagtgcaggcaggagagttaattgctaatttagctggtaataacaaggctaatgttatagaggtccaaggaatattagattcaagtacagataaagaaataactgatggatttaaagaagcgattagtaattataaaaatattgctatagatagaaccattgtagggaattggcagaagaatgaaacagaagataaattagaagaaatattgaaagatgataaggacgttaatataatttttgcccatagtgattatatggcacttggggcatattacgctaccgtaagtactaattcaaaaaatattaaaataattggtgttgatggcttagaaggacctcaaggaggtatagaccttgttagaaatggcatattgcaaggaacatttacatgcaagactggaggaaaagaagcagtagattatgcaataaaaatattgaataagaaagatgatattcctaaaaaagtattactaaagtgcaataaaataactaaagatattttaagtaattaaatatatggatttccatattccgtaaaagtatacaaaagtgctgattaatgcaaatacaatttgtaagtataaatatataattaattcatgaaaacgaaatcatgaatatagggggaattaattatgaagttaaaaaagatgatggcattaatggcgagtgctgtattgtgtattggcatgctttcaggctgcggtggatctggagctggtggaggcgattcagcaaagacatcagcagcgaattcatctagcaaaaaaataattggatttgcacaggttggtgcagaaagtggttggagaacagcggaaactgactctataaaatcaattccaacattagatcctaactttgacttgaaattttctgatggacaacaaaaacaagaaaatcaaataaaagccataagatcatttattgcacaaaaggtagatttaattgctttagatccagttgttgaaactggatgggatacagttcttaaagaggctaaggatgcaaaaattccagtagtaattgttgatagaaaagttacagtttcagatgattcactttataaatgtttcttaggttcagacatggttgcagaggggaaaaaggctgcacaaatactaatagatcaattcggtaaagacgcaacacttaatatagcagagcttcaaggaacagtggggtctactgcaatggttggaagacaacaagggtttaatgatgcaataaaagattgtcctaattataagataataaaatcacaaactggagattttactcgtgcaaaaggtaaagaagttatggaagcatttctaaaatcagatggtgataaaataaatgtactatggtctcataatgatgatatggcaatgggagctattcaagctatagaggaatatggaaagaaaccaggaaaagatatatttatagtttcagttgatggtattaaagatatattccaagcaatggttgatggtaaagctaatgcaactgttgaatgtaatccgctacttggacctcaattacttgaagttgctaaaaacatattagatggtaaagaagtcgaaagaactataaactcaaaagaaagtcaattcttacaaaaagatgctggagcagaattaccaaacagaaaatattaatgataatatgcataagagctggaattcaatccatgctcttatgttaaaaaagatgtagtacgtacatgtttgtaattgtgttaaaacaagaggagtgatataagtgagtgattctaatatagttttagagatgaaaaatattagcaagttctttccgggtgttagagcactttcaaatgttgattttacactaagaaaaggtgaaatccatacgctaatgggagaaaatggtgctggaaaatcgacattgataaaggttcttacaggtgtttataagatagatgaaggaacaattatattgaggggaaaagaaataaaaatatcatctactcaggaagctcagagtcatggaattagtactgtttatcaagaagtaaatctatgtccaaatctatcggttgcagaaaacatatatattggacgtgaacctaagaaaaatggaagcatagattggaagaaaatgaatagaaatgcagaaaaattattagaagaaaggcttaatttaaagatagatgtaaaaaaagccttaaataattattcggttgcagtacagcaaatggtagcaattgcacgtgctgtagatatatctcaaggtatattaatcttagatgaaccaacatcaagtttagatgataaggaagtaaagcaattatttaaaattatgaaaaaatttaaagaagaaggtatgtcaataatatttgttactcactttttagatcaagtatatgaggtttcggacaaacttacagtgcttagaaatggtgagttggttgggacatatgatgcagacaaactttctaggatagaattagtttctaaaatgattggtaaagactatagcgagatagaaaaaagtacaagaacaaagaaagtagttaatgatgaacagagagagaatttaatatcaacaaataattttggaaggtctggaactataaatccatttaatatagaaatcaagaagggtgaaattcttggatttgcagggcttcttgggtctggtagaagcgaatgtgcgcgaacaatatttgggatagataaatctactagtggaaatataactataaatggaaaaaactattcgtatatttatcctcaaaaagcaatagaggaaggtttgggtttttgcccagaggacagaaaagttgaaggaatagttggcgatctaacaataagagaaaatataatattagcattgcaagctaatagaggaatatttaaatatttgccgatgaaaaaacaacaagaaatttcacaaaaatatatagatttacttagaatcaaaactccaagtatggagcaaaaaataagtaacttaagtggtggtaaccaacaaaaggtaatattagcaagatggctcgcaacagaaccgcaattattaattttagatgaaccaacaaggggaattgatataggagcaaaaggtgaaataacagaattaatattagcattagctaagcaaggaatgacaattttgtttatttcgtcagagctaccagaagtagttaaatgttgtgacagagtaattgttcttagagatagaaatattatcggagaactagttggaaatgaaatagaggaatctaatatcatgaaaactatagcaggaggtgctagataatatggaaaataataagaaacaaacttttttccttaaaatttataatgctaaaatattttggccattaacaagcttaataatattacttttgtttaattttataatgacaccaagtttcttaagcataagtatgaaagacgggcatttatttggaaatactatagatatactaaaccgtgcagctccattaatattgatatctttaggaatgactctcgtaattgcaactcaaggaattgatatttccgttggatcaataattgcaataagtgcagctctttctgcaactgtaatagttgatggaggttcagttccattagcagtagcaataggaataattagtggacttgtatgtggaatatggaatgggtttttagtttcgtatataggagtacaaccaatggttggaacattaattttatatattgttggtagaggagttgctcaacttataacaggaggacaaatattaacttttactaataaggatttcatatttatagggacaggctacatattgcttcctatagcaatatttatagctattgcggtagcattaattatgtattttttaataaggagaactgctctaggattatttattgagtctataggagttaacaataattcatgtaaattcgcaggaattcaatctaggaaagttgtattttcactttatgttatatgtggaatgttagcaggaatagcaggaataattttatgcgctaatataaaaagtgctgatgctaataatgttggtttgtggttagaattggatgcaatccttgcaacagttataggtgggacgtctatggcaggaggacggttttatctttcagggacagttgtaggggcattgttcatacaaacattaactacaacaatttatagcttaggtgttgcacctgaaattacactagttgttaaagctatagtagttatagttgtatgtataattcaatctcctgaatttagaaaaattcttaagataaagaaaaatacaaaaatcaatctaaaagataaagaggtgattaaagcatgaataagctaataggaaagaagaacgcatttaagataaacaaagattatattgcaatttatgctacaatcgcattatttataggattgtttctaataggatcagtattatataaaagttttttatcagcacaagtatttactaacttgttcattgataatgcatatttaatagtggtggcaattggggaagcagttgcaatattaactggtggaatagatctttcagttggatcaatgatagcttttgtaagtatgattacagcaagtttattgcaaaaaggagtaaatccttttttagtaatgctaatagttcttattgttggaattatttttggaacagttcagggtatcttgattcaaaagtttaaactacatccttggatagttacacttgcaggaatgttctttgcaagaggagctagttatattataagcattgatacaattataattgataatccagtttttacagaaatctcatcatatagaatatcaatattaccagatgcctttatatcaattaatgttatcgttagcctgatagttgtcgctgctgcattttatatgatgaagtttacaaggttcggaagaactgtgtatgcaattggtggaaatgaaaattcagctaaattaatgggattaccagtggaaagaacaaaaatacttgtatatacattttcgggtttctgttcatctttaggtggtttattgtttacaatatatactctttcaggttatggtcttcattgtaatggaatggaaatggatgctatagcagcatgtgtaatcggaggtatattattaacaggtggatatggtaatataattggaccattatttggtgtattaactacaggaattattcaaagtcttataatgtttgatggaacactaaattcatggtggactaaaatagcggttggaatgttattgttcatatttattgtattgcagagaattattgtaattagagatgaaaagcgaaaaaatgtctcatcttcttaatcaaactaaataatataatatggattaatataataaaatgagcatttgtatgatcttttaaaataagaaagcacaaatgttcattttatttttgaactaatgtaatatatttaaataaatatatatgccaagtattggtagtttgggctataatttaatatataggcttgttaattataagtatagttaataataaaacttgaaatatagatgtgctaatttgtggatgatagatatgatttatacaaatgttttggaggtatagggtgaatagtttaaaaacatattttatgaataagagcataggggataaactcatattttatttttttggagtaatcctcattgttactattactattactactttgggaaatttactatataaagattcaattaacttttcacaaaatgaaaacactaatcaaataataaaacaaataaatagcaatattgaatcttatgttaataatactgaaaacattataaattatatgtcaatcgatcctagaataataaaattccttaatgataataaatctgaagatactgatattgaagacgaagcgtataaatctatttataactttgttaaattcaatccggaaatagctggaataatggtggtaaacactaatggtggttatataagtgatgtaatgaacagagtatcaagagatcctttatataatgaagaatggtatacaaaggcttataataagcctgaaactatacacctatttactaaaccaataggtaggaacattgataatatttttcgctattctgctgatgaagtcttctccatgtctaaagctgttgtggattcatctactaaccaaataaaaggtgtaatacttattgatataaaattagatgcaatcaagaaaattattgagaattcaagaccaggaactgcgggttttatttatattatggatatgaacaaagagattgtttatactcctgttaataatatagtatatagaattaaaaatgaatggatagagaatattaacaacgatataataataaaaaatattaatggagagaattatcaattgacaaagattgattcaaaatatacaggatgggaaacaattggagtatttcctgaaagtgagagtttacgagttattaaatatataagatattattcttttgtagtagctattttggcattaataatagctgaaattttagttataatcttcacaagatctattgtaaatccaattcaaaaattaaaaaggttaatgagaaaagctcaagaaggagatttaacagtatcattcaatgctaagtataatgatgaaataggggaacttggcggctcttttaataccatggtaaaagaaataaataatcttataaaattagtacaaattgaagaaaaaaataaaaggctggctgaaatgaatgttttacaggctcaaatcaagccgcattttatgtataacactttagatacgataaggtggatggcagaagaacataatgaagaagatatagtggagataatagaagcctttactaacttgcttagaataagcttaagcaaaggaaaagaaataataagtgtcaaagaagaacttagtcatgtacaaagctacttaattattcagaaaataagatatgaagacaagcttgattacgaaattcaatttgataaagaaatacttaattataagttaataaaattaatattacagccccttgttgaaaatgcaatttaccatggaataaaagaaaagcgtggcaatggaaagattttaattacaggaaaaattgaagataatttattatgttttactgtagctgataatggaaaaggtatggatgaagaaacattaaataaaataaataatatgcttaataataacgatggaaataagaatcagattggatatggaatttttaatgtaaatgaaagaataaagattatacatggaagtgagtatgggttagtctacagaagtattattggagaggggacaattgttgagcttagacatccaataattgagccagaataatattagatcaaaatgaaaataggtaaaatccgaatatcggattttacctatttatattttatcaaataaggggagtggtaaatattaggattgtagagagtctattatttctttctggaaggttaatgaaatatattctaaaatcatcaatcaatatttaccacttttatataaataagatttatagcactattaattagaatttccaagcggcactagaaaactttagttcgtttttgaatgttgaaagtttagtgtcattattaattactacacattcaactccaaccatatcagcccaatctaataattgttcttcatcaacatagaatgagaagctagtatggtgagcaccaccagccataatccatgctttagcaccttcttttaatgatggttgtggtttccaaagaacgcttgctactggtaagttaggcatatcttcagttacttcaacacaatcaacactattaacaattaaacggaatctgttacccatatcaattaatgaagcagcaacagctggaccagaagcacctttaaatactaaacgagctggatcttctttgcctccaattccaagtgggtgtacttcaataactggcttagttgcagcaagtgttggacatatttcaagcatgtgtgcaccaagaatcaatccattttctgaatccatgttataagtgtaatcttccatcaatcctgtaccttttccaccagccatgattttcatagctctaagaagtgcagcagtcttccaatctccttcagcaccaaagccataaccttcagccattagatgttgaacagcaagaccaggaagttgcttcattccgtgaagtgcttcgaagttagttgtgaaagctgtatatcctcttgcatccaagaaagttcttaaaccaatttcaattttagcttgttcacggatagagtccatagaagctttaggatctatatcatataatttagagtactcagccataagttcatctatttgattttctgtaactgtatccattgatttaactaggtcaccaactccatagtaatcaactatccaaccaaatttaatttgagcttctattctatcaccatcagtaacggctacatttctcatgttatctccgaaacgagcaaccttaatactgtgtccttcagtaaatgcaacagcaggagccatccatttagctatatcagcagaaacagaggcatctgtccagtgaccaactactattttacgagctatgtcaagtctagctccaatatatccaaattctctatctccatgagctgcttggtttaagttcatgaagtccatatcaattgttccccaaggaatttctttattaaattgagtatggagatgaagtaatggttttcttagttcagttaaaccatgaatccacattttagctggtgagaatgtatgcatccaagtaattataccagcacagttttcatcgttattagcatcgttgcatacttttctaattgaaggagaatcagtagcaactgttttaaagactattttataaggtaaatcctttttgtttaattcatcaactattatctttgaattatcagatacttgctctattacttcaggaccatatagatgttgacttcctgtaataaaccaaaattcataattttttacttttaacatttaacattcctcctaatatataaagtgaaactttttaagtggaattttaactccaccttgaatttatacccttaaggggcacctagtccaggagcttgcggccgttatctctcacttaagaagatggagtactacggatgctagctattggataaataaaaatgcttatctaaatttagtataccttttcatgagtacaaacaagtttttgatgtatgtacaagcttattataatacaataatgttgtacatacaagatgtaaaatgaaaaaaataaaaaatattaactttccagataaacattattatggtttaaattaggtaaaaacagccttgcagtgaaatttatatttgagattacgataaaaattattaaagtagatgatgtatggttaacctttgtgtttaaataaattttagaaaaaactattgatatatatagggaatagagatataatcaaatcatcaagtgcgtacaactttttaaaatatacttttaaagaaatcgatttatattttaagaagttattgcatagttatttgatgaaagtagttgaaaaagatgaaagaagctgaaacaaagcacgaattaatagaaaattactatatcagcctaatagaagaaaacaaggtttcagcaggagaccaattaccttccgaaaatgaaatagccaacttatttaatgtaagtaggcacactgtaagacaagctcttacttatttagtacaagaaggctggatatataaagaaagaggaaaaggaagcttttactctaacaaaaaaactaatgaagttaaaaaaaatgttgctgttcttacaacttatatatcagattatatttttcctaaaattatatcaggtatagaggaagaattaagacgcaagggatataatttattattatttaatagtaacaacgacattgagaatgaaagaagatgttttgaggatatcataaaccaagatatatcaggactaatagttgaaccagcacaaagtacaataaataacctgcatcatgatagcattaaaaagttagaaaagaacaatataaaatatattgcaataaatgctaattgtgatgaagaaaattctgcatatattgtagtagatgatgaacagggagggtacaagcttactaattatttattagaacttggtcatagaaacatagctgcattatttaaagcagatgatttacaaggtgaaaagagaagaaggggttacataaaggccctaaacgaatatgacttgagttttaacaaaagtatagtaggagaatatataactgataatcaagagatgtatatagaccaatttataaagaagattttaaatcttgaagaaaagccaactgcaattgtttgctataatgataaggttgctttgaaggtaatagataattgtagaaaagaaaatatagagataccaaaagatttatcaatagtaagtttcgatgactctagtttagcagtttcatcaggtgttaaacttacaacaataaagcatccgaaagaagaaatgggaataagagcagccaaatgcattatagatatgattgagggaagaatagataagcctcaatacacatacagtgctgaacttattgttagagattcttgttctagagtttaaattttatctttgctttagatgacttgattttgggttactggagcaaagataaactttaatgatatatattagatattatttttttatgtacgcttgtacgtacatacatacaacaagcagataggggtgtttaaatgttagagaaattaaaggaaaaagtttatgaagctaatatggaacttcaaagaaaaggtcttgtaatctacacttggggaaatgttagtgaaatcgatagagaaactggattagtagttataaaaccaagtggtgttgattatgatactatgaaagcagaagatatggtagttgtagacttagaaggaaatgttgtagaaggaaagtataaaccttcaacagatactccaactcacttagttatgtataaaacttatccgagtgttggaggcgttgttcatactcattcagattgggcaacaacttttgctcaggcaggaatgagtataccagcttttgggacaacacatgcagattatttttatggggatattccttgtactcgggatctaacagatgaagaaattagtggagaatatgaaaaagaaacaggaaatgtaatagttgaaactattggagataaaaatccattagaagttccagctattgtagttaaaaaccatggtcctttcgcttggggaaaagatgctaattcagcagtttacaatgcagtagtattagataaagttgctgaaatggcatataagacaatgactttaaacaaagatgtaaagggtgtcaaacagcaccttttagataaacattatcttagaaaacatggtgcgaatgcatattatggacaataagatatcatagtataaaccaacatatttttaaggagaatttttaatcagcaattggaactcctttgtaaattctccttaataagtatgaattaaaaagtgacgtataaaattgaagttaaaaaagaaaatgtctaaatttaatattatgaaacataaatattaaatggaaggtaaatatgcaaataatagtttgttgctaaataacaaacaaaatatataaagaggagatgttaggaaaatgagattttttttagacacagcaaatgtggaacacattaaagaagcaaatgaaatgggagtaatatgtggtgtaacaacaaatccatcattaatagcaaaagaaggaagagacttcaatgaagtaataaaagaaattacagaaatagttgatggac

SEQ ID NO: 133 - DNA, 13169 bp, Clostridium beijerinckii
agacaatattttgcactaaattataaaacttagtctataaatttaaacaaaaaaaatataaatatctataaagtaagattactagttatcctacagaatagatatttatatatttcttattttttcatgattcatttattaaatgttattactatcaaagaatgtcattaaataacatatttcatcatctgaaacactaattgaatactttgtatttataggtgcacatgcatttttcacaattttatatagattaaaattattttttatataatcctttttcccttcaaattctaaggtaattttaccttccttatatctatctattacacacgccatatgaagtgttattccaattagaatattaatctttatattaacctttaattcttcagtaacagttctattgaatttctttatgctctttagtaccattattccatcaacattttttaaatcacgctctaaagtttcctccatttttatatatgtttcttctgcatcaataaggttttgtatatccttagcacaatctccatctataatatcatctagcgaaaactgcggactatttacatctaattcaaaaggtccgacaaaacaaataatttcgtatttattccttaatttttctattctttcatatacattttctttgcctataaaatttataggcacaatttctattacatttttatcaaaagttagatttcgttccaatattcccttaatagtcttagctccaccttcaccagttgtacacactgttactattgctaatcttttatctttctcgttttccttataatctatatctgcaacattatcatcatataaactattaacatctagtgtttctctatatatttcgtccaaagaatatcccatcatagattttcttgttgcttctaatgcatgcaaagtgctgactaatggtatggttctagtttttatattagatatattttctacttcttttccaaaagtcgtaagtgatcccatatctactaaaaataatatatccgatttaattttttgttctctaatatattctatagttttctctaatatattctcaggtttttcttctatgggtgcattaatacccgcagtattttctgttccaagcagactattaactgcctcagccattgatgtcgcagtactaataccgtgggcaattattattatctttacatcattttgtatatatcttacgtttctataattataacttaagaacatagctataaatccggcttcatcaattggcatacttatatcaattgatctctctatcatcttcaaagcatctaaagccacactaaattcttttttattttcttctctaatactacttaatttaggattaacaatttttttatttctccttattctatctattgaattactaatatgaactgctaacccataacttatttttttgtctagctttattcccagttcttcttcgcagaataaaataatctcctcgattatatccataacatctttctctacgatgttttttatattggtcatatcaactttagtactaaaatcgttaatatattttttaaaataatcttcaatatctttttctatttcttcctctagatgttctccttttattccctttgctttaagttcatttgtccttaaatctaacatctcatagatattgctatcattagtaccttcttcaaatatctccctatcttcatccttatcaaatattagatatctcttatttatatcaatcaatttgttccataactgtctatgttctatctctttatataaaccttcccttatatatagcggtaaatctatactatttatctttattacatcttttctattcgacagaaaatcagcatatgctttagcacaagctaattgtatatcagatcttaactgccctacattgttctcacagttatatgataaaaaagcttttattgagtttactgacaccttaatactttttccaagtcttcctgactcttcaatcataaattgttttattagattgaatcgttcttccattcctctattctttaatgatggtattgttataaccataggaattcttcgagtaaatgtttttagcaatgtagtatttggatcctctgtagtagccgttattataagaacatttgcacttctttcactttctgtttctccaagccttctatatacccctctatccataaatgtaaagaacatctcctgcccttctgcaggcaatctatgaacctcatcaagaaataaaattcctccattagctttctctagcaaaccgaccttgtcaaaatccgcccctgtataagaaccttttcttactccgaataattgcccaagtaataactgaggattatttgcataatctgcacaattaaatgttataaaaggactatctttagatttcacattcatttcaatggcatatctatagatcagtcctgcaaaagtcgatttaccaactcctgtttccccaagtaataatatattcattccatttggtggatacaatattgcggcttttgcttgctctactgctgaatatagactagggttagcttccgaaaacttatttatgactgataaatttgaggtaacgttttcctcatctattgcaataaatagtgtcggcttcccctttatctttattgccttcccatcacttactaatttattcaaatcattacttacatttgctctgctaaggtttaactcctccgcaatttctaatgcagaaattccatttggaaacaaatcttttatttctcttaactttgcaagaattaattcaattcttttcatctcattaatccccccctattaacttaaaatatttttacatacactacttaacttaaaatatataaagcgagactctatacatagtaatataataacatactatttattagtctcgcctactttatcaatgacaataatgatatttgtttgtagtagtccaattacaaattatatcattgcttttttactttcttgtaaatacctaccttaagcaattaaattaggctcatacatttacataaaatgaacataatttaattagcgcttatcttcactctcctactaatccactttctctcatcctattaacaaatttttctgacttcttattcatcttttcttttaaaaatacagcaataattattgatatgaaaaaatatatagataaaattccaatattgtaatataaggaactccagataatcccaccctctgcctctctcattcctcctatcgcatatgtaaaaggaagcattggacttatattttgaaaaaatttaggcgtaagctgtattgggaaagttcctcctgatgctgaaacttgaagcaccattataattaaagctaaagctttacccacattcccaaatactgataccaaagtgtatataatcattataaaaattatacttacatacatagaaaatattaaaagtattactggacttacagaataagttttaataaaaaataaatttcctaaaacaataataatggcttggagtaatgaaagggttgcaagagttaagaacctgccaaaaaacatttttgtagttcctaaattcttgacatcatccagcgcttctacatggacagacagtatagaaagtaatgtaaatccacctacccatatagcaagagtactgtaaaatggagccatagctgatccataattaggtataggaaataccctattttgaactggctcaattggatttgccagaaaatcacttacatcctttgtatttttctgtagaagacctgtgagttcgttgaatttttcatcattactcaaacttttaaatttttcaacattactgtggatagtctcctcagtttttggaaatttatctttaatatttttaatctgttctgctcctaaatcagtaccaatattagcgtcttttagcagactatttattaaaggtatattattttttgcactttctaaaagtgttaatgagttgtttgccatatttgttgtattgttcacaagactatttattgctggcgaaatagcgctgtcaaaattatttattgaatcatcaataagttgtgatgttttatctattccttgtattagagattctactgcatcggaagaaattttattaccattacttaatgtagttatcaaagcatctaaatttaatttattttgaactaattgatccctaatattttgcattttatttataaaattagatattgcactactatgtaaaatattatttacagactgaagtatatttatatcattattaacagcagatagtgcattattcattttagttgaagccgatcttagaatatcctgctgccccttaacatctgtatcaatggaattattaatgctgctaagtgcatctcttgttgcagcagaattagcctttactgtagctaaatctgttctaacatatggagatatattttttattgtgtcattagccttagtaaaaaaatcattactggattgcacagcattttgagcgttgttcagtgaatttgttatattaggtatattcccttgaatattttgtataaagttatttagatctactgccccattataagcattatttatgccttcaccaatttgaggcaggttattatctatgtcatttataatattcataagttcttctagctgaggcttaatcctctcaagttcaataccataagcattcatataattaagcacagtactgcttacttcttctgtaacagaactagttatttcattttgcaaactggttaatccgctttttgtaattttaggtgctatcgcattaattttttcgttaacagaataaataagtttagcttttttaggttcaccattcgctgcaactgagagaagattacttgaaaaatcttcaggtatagttatactagcataatacttaccatattttactccactttctgcttcatcctcattaacaaaagtccatccaatactttcattaccttttagcttatctattacctctctacctatattaatttctaggttttgaaattgagcgccttcatcattatttactactgccactaaaagtcctttggtgtttccatatggatcccaagaagctattatattaatccatgcatataaagcaggtacgaaaagtaaccctactattataatcatgagaggaatattagttgttatttttcttatatcccttttgtaaattttaaatattgtactcataacttttgcataccttccttcttgaacttaatgttaaggcacaattaaacaatacaagtataacaatgctaagtttatgttctccattaaagtattaaataattcaaaagcacttttatgattttactacgacaactcaacaatagattctaatcaaaaataatactgatgagaactatcccatcagtattatcttattattcgtataattaattttcttcaaaaatgcaataattatttttacctttactttttgctaagtagactgctttatccgcatttgtaaaaagttccttaaaactcttaccatgctctggatattttgctattcctatgcttccagaaactttttgacttaaaacttcatcggtattattactcctaaaaccattcattagatcttttgctttttcaattaataactcttccgatgtaatatttttaaggaatatcacaaattcatctccacctattcgtcctacaatagaatcttctttgaatatctctgaaaacattagtgaaatgtcagttaaaacaaaatctcctgctagatgacctaaattatcatttacagctttaaaattatcaagatctacaacaaatagcgctccactatcgcctttcttagcacttttcatatattcttcaatcatattttgtactgttcctttattatataagctagttaaactatctctttgtgctttaaataaaagtttttcattctctctcttttcttcatcaatatcaataattatccctatggccttaaatatatctccatttccatcaaacatggcagttattcttattttgcaccaaatatattcattagtatttttctttattctaatttcagcttctttatatgtatccccatatataataccattaagcaattttccaaaattctttatatcatcattataaatataatctgttttatatataatctcactaacattgtttacaactgatttatagctaaacttattttcccaatttccagaaaaataaacagtatctttggggatattccattcaaaaattgcgtcttctgtttgagacataattatacgatagcgctcctcactcattctaagctcttcttgagttattttggattcagttatatttattactacactgtagctaaataatttaccatagctattttctactatttgaccgttatctaataaccatacattgactccatcactccttttaaccctgtattctacagtgtacttaccatatttacttatttgttctcttatatccctcattactctttctctatcagcctcgcaaattaattcaattaattttttacgcctttgattttcagtaaattcatcttctttgtaacctaaaatgcttagacacccactacttacaaaatctaaaatatattctccattttctattttgcacgtatatactcctcctggtatattggatgttagagattgtagccttctatttttttcttctatatgctttttattcttttctatagtatccatcaatccattaaatgctgttgctatttctccgaattcatcctccttattatatataaatcgatcatccatattaccttgttttatctttctaattacctccaataatttatatataggcttagagaaataattaactataaataaatatgatactgttattaatagtgaaataattataaaaaatgccacagtattctttatagttctctcagttggcgtcttaaattctgataattcaattgcacttaatactatccagccagtattactaatcctcgaataatatcctatcttttcagtgttattaattttatattcgattattccattaggtgtactatcaaaatctatcttttcccactgctcgtacaaattattaggaacatttatcttttttatattttcttttatattattgctagttccagctgcaacagcgccattttggtccattatcagtattcttccagtatcaaaaaagctaacatcgtttacaagtttttcaaaataattcatattcattatattagctataaaaccttggtatttgcctcctacaaatatagggcttgcaattatcgcacttttggctccatcattaaaatcttctctttctataatgtttgttacaacaacttcgttttgcttaagcttctcaacttcattattaggaatcatagccttcttatttatgaactcactattatcacatgcaataattacaccctccttgtcaacaagtacctctctacttaaaaaaaattcttcttgcattctaccagccaagatttcatttaaaacttgtatatcatgccttttatcttctaaatcttctttattatttaatgcagttaatattttttttactattggtatattggtatcattattaagattactaatattctcatcaaaaaaagcttttaagtgtatagattgatccttagaaaaagtttctacattctgcttagttaattctaagtttctagtattaaaatttgaaatacatatgcttgtcgaaataattgcaggaattattccccataatatagataaaactataaactttcttcttatattcatctttcacctcattaatatatcattaatagacaaattatatattaattttatcagattttataattattttatacatattatattaattattgtgtttttttgtagttataaacaaattaatatcaatatttcattcttctttatcatttaatcattatttcgaaacgttctatatcagaattttgcaacttagactattgttctatagcaaaaaaaatacacacctcatatttcatgattagagattttggtttcaataaaaccttaagcacaataaaagtttatgtgccttattcctaaccactcagtatgagttgtgcatttcatatatttgaactttaaaatatattattgtcttttattctacgattacaccagtattattcatttttttattaatacaaatatataatcattagtctctaatatatttattaattgtagctgctccttcttcatttgcatgataataaactcttaaattgcctgcctcatccatatcaaaccttgtttcttctaaaagtccattagcttctgctgtcattagagctgaaattacagcatctcttttaagggccttaaatttaccatactcaccttttagagcttcaataacgtcttctgcacaagcttcaggtactttcgtaaagtattttaaaatagcataattaagtggtttcatactatcttacctccttttttctgaataaatcaagcggattcattgcaattactaatataccaactatcattagtactgctgctccccaagcgattggaggtagagaccatccatctattccaaagattacaccaagtaatatccaacagcaaaatggtccccagaatgaatatgtaccattacaagccataccaagtgcagcaccacacatactattgcctttataccatgtcataaatgaaataaatgcacaaaggccacttgcagcaaaccaaatcatagcagaaccacttgtaaatgcttgagccacaagccctgctgaaatattaactccacctgctatcatccctaaaataggaatgaatataattaaatttgaaagacctgctgttgcctgacgaatggtaatacctatctctgaatcaatcatagatgtaccatagccagctacacaaccttcaaaaccccatccaagagccgcgatgaaagcaatgcaaatacctaatagcataccttttggtgcatcccctgtaatacctgtacttccaatcataaagcttgcacaaacacagatagcaatacccaatatcatacgtttatttaattcctgcttgaataaaattctacctaaaatagcaccaatagctggacaaagggcagtaataggaataactattgaccctgccatctgaagcccaataacataagccgtgctagcaataggtcctcctataagagctgctaacatcattacacgccccggggtagtattaatacatcttaagaaatctccaaacttacctttaataattgcataaatcactgcccatacagcgctgcaaacatcatttactgcacttccaagtgcccctaataaatacgtaataacaaaagctgataaaccagctgaatttactcctgtccaatctccccaaactcctttagtcatccccaaagttagaaatgctgagtagaatccatacatgagacctgaaaataaagctattgtaataccctttttaaaaaattgtgccgataatttcctttttgcaataactgcagcttcattaactgtggtattttttataatattttgcatcaaaaatctcccccttaaatataacttcttattcgtataattttaactttttctaccttacaataatcttcttaaactaaattatttccttatactatataataaacaaaatgaatatatattaaacttaattatgccttagccttaagttcattttgtgaacaaaattatattatcattgttcactgttcaaatcaacatgttcacataaaaaaatattataaattttcataaaaagctttaaattgatttattcccattcatatttaaatacttaataaaaaatcatgcctttgaaagcgctatatctttaacattttacatgtcaattcccaacagcactaacaaacgcatgattctaacttaagagctatataataaataatatcctcttaatttcttattcaattctaattatcttttaagcttgaatttcaaaagtaatttgtctgccagctcaaaaaatacctgatccttagtaaatataagaattccagcatatattaagccacatgcaaaaacctccactacacatccaaaaagtatgttatgtataacaagctttattccaaacgttataggaatgaatatcaaagaataatagaaatactttatattctcgtaagcgaacaaatgtatatctaattttataactttcttaaccagcctatattctaaacctattacaataagatttgctaaaagagttgtacttatagcagtaaccatattaaatgttcctgttagaaataatgttgtattaaaaattaaattaagtattcctccaattaatactaacattgcatcatacttttcttttccgtgaagatatattatttgatttgctattaccccttcaactccaacacttaacatatgtattgaaaatataaccataaccggaactgctgctaaaaattctggtcctccaaagatatatatagcctctttagaaaggcacaaaagacctatagatgctggaaataaaatcagaaaatatatctttataaccctttttagtaggaccaaatactcacctttagactcatttcccaagtagttagagagccttggcatagtaacttggataactgttaatagtagtgtacttactatagtagttaccctctgagccatataataatatccaacatcggtagtccctccaatactgtcttttagcataatcttatcaagctgagtatataaaactcctgtattagaaagaattacaacgtaaaacataggttttaaatgtctaaaaaattcaagattagaaaaatcaaaccttacttttctttttacgtatacgaaacttattatattatttataaagttaaatcctataactaaatataaataaaacaaataatcttcttgttttctaacaaatagcaaaatcaatgcagaatatactattctaactatcattgttttaatagcaatgaaatcataattttctaatgcttcattaacccattccacgtaaaaaagattaaataccaaattaaatcccataactatacatgtataaaaatatggttcatttttataaaaaatagctacaaatatcatgtatgcagctgaagctaggatattagtaacacttgcaaaaagaaacaagctcgtaaacgtttgtctaagtttagccttgtcatcacgaactttacttatttctcttagtccatactggtaaattccaaagcttgcgaatattaaaaaataagcagttagagaatctccatatcccatataaccatataattctttaccaactgatctagtaactaatgggattaccaaaatcggcaatattatgttaaataagttaagcattgctttgaatatcgcattttttgaaatagatttagccatttgtttgtcctccatatacgtattctaatcaacaatgcacatttaatgacttttaagcacactgtgataaattagaaattattttattaaaatgcacagttccaattgaatttatttctacttaacaagttattgacttcgcttcgcactttttatatcagtttttagcacttcctgcttttttataagttcttagttgcgcttcgcgctttttttatataagttcttagttgcgcttcgcgctttttttatatgtgtatatttttcgctttttcaattgtacattctagtttattcattgtcaattcatatacaaattatatggaaagtgttgaaaatttatggacttttttcttactttgagttataatcaaactaacaactgttagttttaaattataagataatagtagtggaatattatgcttatttctcaaactctaattataatttatatgtatttgtgtttgatatatattaatataaattaagcactttaaagttatgcaataatatttttgtgaggagtttttatgaatacaagagaaaaaattatatctgaatcattaaatcttttttcaaggaaaggttttgatgcaatatctgttagagatatcgccaaagcagttggcataaaagcaagttctctttataatcacttcaaaaataagcaagatatttttgatactataatccaaaaatattcagatttagtaaataaatttttgaacagtataaaaattagggataattctgatgagaatcttcctaataaaacaaattggttatctgacgaatactttttcaaaaaaagttcatacatttttaatttttacttagaagacgagaatatgattaaattcagaaaattgctgacaatagagcaatgtaacaactctaaactttcagatttatataataagatatttattgatgatatattagattttcaagctgacgtattttcaaaattaataagttcaaacgtatttataaaaaaagacccttatacattagcacttcaattctactccccagttttcttactattttataagcacgaaaacttaactgataaagaacgtagattcttagaaaatcatatttcagaatttaaagacacatatatagtgaaaggatgatcacttgtgaatgtaattgtcatttatgataactcaagcgagacaaatacatataattgtgtgcaactcttgctaaatgctcttaaacttaatattgaattaaaagtcacggaatttttcttatcaaaagattatatttacaatggacgtctttcttatcccgatattgattcaaaaactgttaatggtatggagtacatcataaattcattagatagctctgatttacttataatagcttctccagtatcaaaatgtgatattagcaatgaaatgaaactgtttttgcacagactatcttgttgttacctattaagtagctcaagatcccaaataaatgataaaataggattgtccatgtcaacaacttaaaatggttcctatgtcaaggacattttgaaaaaggctaggcagctatgagctggtttctgtattgtacaggagccagctttttaagtccccactgatatctataattattataatactccatata

SEQ ID NO: 134 - DNA, 13127 bp, Clostridium beijerinckii
aactaatgaactataaaagtttatttttatagaataagtacaatattgaatacggatatcattattcttaacgtgtttaataggaagaccaatagaggagaagatagattaaattaagctgagactttcttataattaggaagtctcagcttttttataactaatatataaaattattaagtagatacaaaatcgatgcatcataagaaaaataaataaaataaaagaaatactttcttctccctaaaatttgatgattagtagataagttttacgcctatgaatataagcaactaaacagatgaattaaaaatagtatgactgacatctcatactaatagttaaaatggtgatattataaaaaattaactattggttaatttttatgaataaaagatgaaaagtcttcaattgctcaaattatgtagctttgatatcatttaattataaagttccgcggtgagaatcaaatttatgtggatatagccgaaattgaaatatttcaaattttcaatgaggaactcaataatgttttatttaatcaataaggacataataaatagaggagttaattttatgattataagtgaagttattaggcattatagaaaaaaggaaaatcttactcaagagcaggttgctgattatttaaatgtaagtactccagcagtaaataagtgggaaaatggagtttcatatccagatataacattgctgccacctcttgcacgtgtcttaaaaatagatgttaacactttattgacatttaatgaggaattaacagatacggaagtaaaaaaacttacaaaagaggtaggtgaaactgcatcaagagagggaattaaaaaagcttttgagaaaggcaatgatttgattaaacaatatccaggttgtgatgaattaatattaatgatatcagaagtgctaagaatatatttgttaggacctcaaattgaggaaaaagaaaaatatgaaagaaaaattattgcttggcttgaaattgtagtagctggtaataaggaaaaaacagcttctatggcaaaattagatttagcagcaatttatagggagaaaaaagaatatgaaaaggctcaggaagtattagataaaattccagaagtagacgtagataaaaaaattcaacaagcaatattatttgaaagtatggataaaatagatgaggcttatggtatttatgaagataagttaagaaaaaatggtgacgaaacatttgctgtattatctcttataataaggctattgtataaggaaaggaaatttagagaggcagcagaatacatagatcgtgctaaaaagattgctgaggtatttgatttaggagcgtaccataaatatgaattagatttatctttggcaatagaaaaaaaagataaagaaaaaactatagagatggttataaatatggtaaatgaagcaagtacaatggatgactctattaaatcaaaattatataagcatatgaaatttgatgtgactaataattggaccaaagataaatataaagatttagtaaaaagggtattaagaaaaagaaagaatattgattttgttaaagatgatccaagaataaagtctctgttggaataaacaatattaagtctattttattttaagattagaaataaaatagatttaatatttatctaagtgatttttaattttgcataaatttaaggatattgcagcatacataatataaagtcaaaaagaattgtaaaaacaatcttattaaaggagatttaaatttgggactaaaagacagagcgagaaaattaaaatcagatatacctgccgtatatatatcattaagaaagaaggaaacaccagtaattgcaaaagtttttgctatgattacaattatatatgcgttatcaccaattgatcttatacctgattttataccagttataggtttgctagatgatataattttacttccaatacttattgcaataacaataaaatttataccagaagaagtacttagcaaatgtaaaattgaagcagaaaacttatggattagcggaaaacctaaaaggtggtattttgccataccgattttattagtatggatagcgttaatatttctaacattaaaacttatttaaatgaaaccttattaaaaataaatgaatgttcaatgtttcaattaaatattcttttaaagaaacattgttttaaataaaacttttttacaatttaaaatgtaaattatccagccatgtttagtaatagaaaagagtttagaaatttagtatttaactttttgatgtaaattacaagaatatttggtggttaagatgatattcctatattataatattaggttaattaaaccccaatatgcataaatcgatatgccacattattcataatgagttttgtggcattttttgcaatgctaataatatttttgcctttggatcaatttctattgaaaaacaaaattttccaaaaagaaaaatataaagtaaaacatatagctaatatagttacaaaacacgaaaactacaaatgtgaagttagcccattgatatttgatacattaattgataggatttttatcaaaactactgacaagatagtgaaaaacctacatctaagagataaagatttttgggttaatgataattgtaatggctgcagattatgtgaaaaaatttgccctgttaataacatacaatttaatattaataagccagtatggaaacataattgcgagcagtgtgcagcttgtattcaatactgtccaaaagaagcaattcaatggaaaacgaaaactaagaaaagaagaagatatagaaatcctaatataagtattaatgaacttatatggtgttagtattaagatttatttataatatgacagcatgttgtcatatttagcaatttataatgattatggaggtgttgattttgaaatatgaatggagaaaagaggaaaaagagatctatctgccaagagaaaaaccagctttagttaaaattcctaaagcaaaatatttctgtattaagggaaaagggaattcgaataatggggatttttctaatagaattgctgtattatactctcttgcttatgcagtaagaatgatgcctaaaagtggttttatacctaatggatattttgaatatactgtttatccgttagaaggattatgggatatgactgaaagcggtaagagtagtaaggtatttaataaagatgaactgatatatacaataatgataaaacaaccatattttgtaaacgaagaagtaacagagaaagcctttgaaattgttaataagaagaagccagataaattattagaagaagtttattttgatgaaatagaagatggattatcagttcaaatgctacacataggttcttatgatgctgaaccagaaacttttagtaagatgaaagactatattaacgaaaataatttgaagattagaagcttagttcatagagaaatatatttatcagacgctagaaaagttgaaagagataaattaaaaacagtattaagatatacggtaactaaataataaacttaaatttgtacaagaggtaaaatcaataattatttatacaataaaggagaaatactatggcatataaattgaaagatataacaataagaacaaataattctgatgagggaataaaaatgattgatgaactatggggggatattgtaagtggtaaattacctcttctttttgatagtgaacatatacttcaaaaagatgcttctccaatttcaaaatatagcaactattctagtgatgaaagaggggattatgaccttacaataatgaatgtaacacctgatttttttgagaaaatggaaatgaaagtgagaacaggcctatataaaaaatatgatgaaagagatgaggatgggaaaatagatgtgtgtgcaaaaaaagcatgggaaaaggtatggagtgagcaaaaattaggagatataaagagggcattttcggaggattatgaaatcactgttcctagtgaatacgcaaaagatggaaatgcacattgttatttatatatttctgttcagtaaaataaaaaataagttgaaatacattttaaagcattatattatgaattcaggcaccggtgtacattattaataaagaaggtaaagtatggacattaatattgaaatgataccagaatatgaaattgcttatataaggaaagtaggtccttatggtttagaaaatgtgcaagtaatggaaaaattgaaaagctgggctgaagaaaatagcttatttaatgaaaggtcaataatcctaggaataactcaagataatcctgagattacagaacctgcagattgccgctatgatgcatgtctagttgtttctgatgaatttgattttgaaagtaagaatattaacattggaaaaactattggtggaaaatattgtgtgtttaaaataaatcatacagtagatgctatacaaaaagcatggcttgaaatattttcggagttatcaaaaagaaattataaaattgatgataaaagaaagattattgaacgttataccatgcaaatgataagtaaccattattgcgagatttgtgtgcctatattataaaaaaatattcagtgaataagcagtctataaagttagaaaatgctgtatataatatacatctatctgtagtcaataatgaaatacttacctaatatgctataattagtttattaaaattttattttgcatataaagggggattaattatgatagtaaaaagtgtaacaatttatgtaaaacaaggtcacatagaagagtttattaaagcaactaaggaaaataaaaataattcattgaaagaaaaaggaattatatgctttgatttttttcaatgcaaagatgattcaactaggtttttactttacgaaggctataaatcagaagacgatgtgaacaaacatatggaaaccgaacactttaaaaaatggataaatacagttgaacagttgttttcagctccgagagataaagctacatacattcctgttccttaaatagtagaaacgttaaatgtagaatggttgctctattttgtattaatagataaaaatttatattaaatatactcctaggcattgagacgtagtaagaataaattaagctaagattttcttgaatttagaaaatcttagctttaaatatgttacctcaaatatcaatagaattcaaatctatttcaatattatcataaatattaaactgattcttataactaaaataatatcattaaaaatgcttttgtaatcatttcatatacatatccttcttaaaattatagggttttatcacataatatggtaaaattgaaatgtttaataagaattataattaaagaaaggagaaaatatgaccgaaattatagtgatttttgcattaacactaataacgcttagcgccatattcttggatatcacgaaaaaattaaatttgctacataagattttaatgtatatatattttatatttgcgccacatattgttgcgttaggatattttttaatccaacatagcaaatttggacaagataatgctatatacagatggactattttaacggagataattatttttattctatatatttttataaaaataaacataattccaaataataaaaagcaaatagtaaactttagattaagaataatgttaggcggaagatgtcttgttttatatggattatatacagcatttgttcaaattattatatatttaataggaaatacaataatgcaaagattagcaattccagaacatatattagtaattgatagtattattgttatgttaaacattattattttaattatcaatggaatgctaagaattttatgtacttcaagaagattaaatattgtaaaaagacttatagtaggcttttggagtcttattccaatcgtaaatatttttgtgatgttatatgcttgtcacattgcagcaatagaatatgatcatgagtgttataaagtaattaatcatgaagcgcgtgttgattcagaagtatgtaaaacaaaatatcctcttgtattagttcatggtgtaggttttagagatttaaaatatattaattactggggcaggatacctaaagagttaattcgtaatggagccacagtttattatggaaatcaggaagcttggggaacagttgagtataatgcagaagatataaaaaataaaatattaggtatattgaaagaaacaggatgtgaaaaggtaaatattattgcacactcaaaaggtggactagattcacgttatatgattagcaaattaaaaatgggagattacgttgcatcattaactatgatatcatctccacacagaggatgtaagtttgttgatcttgcttgcaaaattcctgatagaatttataaatccattgcaagattttttgataagcgttatagatttctaggtgataagaatcctgacttttatactgcaagcagacagttttcaacgtatcatagtaaaaaattcaatgaagaggtaaaagacgtagatggggtgtattatcaaagttacacatctgtagttagaaatatatttagtgattatgttgttgtaataccatatattttagtaaagttaacagaaggtgaaaatgatggtctggtatctattgaatctgctaaatggggagaatttaaaggggtattgagaaataaacgaaggcgtggaatctctcatggagatattatagatctaagaagagatgactataaagactttgatgtaatagaaaaatatgtggaaattgtatcagatcttaaaaataagggtttttaggtagtattataaaatttatatgaagcattatagcttataaataaaggattaaaaatactaaggcaggtttaattaacttcgcttaatatttttaatcctttatattttaaacatttttattttatcgcctaaaaccaatatttattacttcttaaacgtgtcattttacaagtatattctgattcaaactttaaaattttgtattattaaaaaaatctaaaagcagcaaatactaataatattattataactggaatagacaaaatagatgccattatacgtctaccaattttacttccaaaattaatagtgcttcctataccatttctcttatcaacagattcagatggattatctggattatagtagaaaactccaagtttccaatgtctagggtcatcatctttattcactagaaatacatctccttatatttatatacaaatagttaattttatatttttttaattatatacctttaattgtaaatattcaaatgtctaatgtatctacatataaattttgaatattgattttgaaaacaggatgcaaagctaaaaatatactaatttcatagtgtatttaccaaaaagactctgtagagattattctataactaataatactgtacaaggttttaaaattttgatgaacaattattaatagtcaaaaatgagagtatagcaccaatactaggcgttactgtgaaatataagtattccgtatactctcattatttctaattcattattaaaataagtaatcgttctaaatcaaatattctgctcgtattaaacatttcctcaaggtcataaagggttttttctgaattttcaacttccttagaatacatatgcattatgtctatttgatcatttatatcaaagttataattattatcaatccagcgtactacatttaactctttaataatgagataactcatgacagctagtgtaactttagagcataattcttcatcaaaaatagctttcataaaatattggaatataaaatataccattaagtgttcatattcataggttctagttttataatattcattaaaagcatcatattgttttttataaaaagtaacattgtctattttataaaaacagtcaatagcatgatctagtatttgtggccagttatcattaataggattgagatttttatacacattcatacatttaagcatatttttatacttataagattgttttgctttatacttatcaaacttattaagaagctctttcttataagatccgctagaatatctatttactatatttttaatttttgatagttcatttttatttatttcttcttgaatatcatgagcaaaattaattactaatgcaatcctatgatttaaatctatagatcggtcttgtagaatatctaaggccattttcctagctgatattagctgcatggaaatatcaaaatttatatcatcatatgggttttcctcttcataatcgtctgaaacttcaaaagtaattggcttaggaccttgaagaattaatcttgcagcctcaggacaggacaaagatacccccatctcacgtaaattactgtattcctctattaaccttgggtatgtcttgcatgtataacataagcttttttctccaagttcagtatagatatcacaaaggttatttttatttaaaaacgggcagttattattttgtaatacaaaaccaggctctccatcttcatataatattaaatttgatcttaatctttcaccaaattcaccacttacattgttataattcttatatgtttcatcatcaattataatttcccacccagcacaacaagtatcagtacattttgaagcgatgcatttaaaatctttataataatggggtactattgttttcatgtaaattacctcttatgtttattaattagggcatatagaagaaaatagacacatataaaaagagtagctatgatacaatacggaacttttctgatataagaacatcccatagtgtcattgacttgttatttacttgaatatgcccgagttccattataatataccacttaattgagtattgagaaaagtattttaatgagagaacaatgttttgtggaataatacttgtttgattatatggataattttttaactgcaaagaataaaaggataaatgaaattacttttgattttcataaaatgtcccttagagataaaatagtggagagtgcagtatttttgaataatgattgatatttagagaagtattgtattgtgggttagctacatattaggaaaattattgcatttttatatgcaaaaggtctccttttatctagcagattatttttatataataataatataagaaataggagagtggagttcagatgagatttagtcagataatgagtgacttcatagacaatgaagattactgttcaattgaatattttattcataaatacaaagtatctaaaagaacaattcaaagtgacatttcatatctcatgagaatttcggcaagcaaaggatttgaaatacatacaaaaaggggagtggggtatttattagaggttaaagacgatgaattattcgagaaatttcttaaaactttagatgaaaacattgtttttaagataaaagaaagaccatctcaaatactggcatttttatcagtccaaaatgaatacatttcaatggataaagttgcagacacttttcaagtttctaaaacactgatcaagcatgatgttaaagaggtagaggaactagctaaaggttatcatctggctttggaaaaaaagagccatcatggaataagaatagtttcttcagatagaaatcttaaaaaatacttatgccaggaatatcaaactaaaaacgtatttgttagaatggcagttgacggtgttgtaatggacttttcacatgttgagtcccaattgataagacagatgaacaaagaaaaattaaatattaattataatgagctattaaatatgatagtttatctaaagtccatgatatatatttcactaaaaggaaataaacaacctgtccaagattatgaatttcatgaatctaatcctattgaaaaaattgttgaatcattaattcatacaatggaaaagaaatataaggtatgctttgataaggatagcgttgaggaattgatagaagttatgcagaaaaatatccataggaaagatacctatgtttctttcactgacaatttgattgatgatatagaagtttttttgaaaaaaacagatgaaacttatgatactcatttttttgaagatcaggacttgaaacggcttttactttcgcatatatccttattagtagacaggcttcacaataaaatttcatataaaaatgctctggcaaatgagctaagtatcacatatcccatgatatttaatatagcaatacaattttgtgatattctccatgaaaaatataatgtagaatttacctttgatgagatagggtttgtagctatgcattttgcagcacatatggtaaaggagaaacagctaaagcttcaatcttacaataaaatctgcgtagtatgctcttctggcggtggaagcgcatatatgattaaaatgcagcttgaatccgtattcccaaaggcagaagtcaaaaccttctcttttttgcagcaggatgagatgatcagctataaaccagatattatttttacagttataccaatatcttatgatgcccacatacctatcatttatataaaagagctcttggatgacaaagatctatatagaattaggcagattcttgagtgtgatgattatgatgcctatacattcataaatgaaaatccaatatactattcctatttctcaaaagaatttttcaatatagcagaagatgatgattatgaacatcttattagagatatggcagaagacattgaaaagaaagaatatggcaaggaagaatatgcagacttagttatggaacgggaggcatttgcaagtaccgtttatttaaacggcgtatgcatacctcatccaattgaaacagatgctttaagaaatgtaatatcagtcagtatattaaagaagccttttctatggcgggaaaaagaagtaaggattgtttttatgatttgtttaaaaaaggaacaggtagaagtctataaagatattactaaaaagttatatcagcttatgcaggagccaaaatacttggaaagagtgattcgtgttagatcttttgaagagcttatggcggtgatgaaagagatgggaggtgctaattatgaatgatattttattaaaagcattaagtgatgcggatagtatagcttcaaatgaaaatgaagtcaggaaaattttatacaaggaacttgaaaaatatagtgatgaggttttttgcgataatatcggaagcgttatattttataaaaaagggaaaggtgagaagccactgaaaattatgttctgtgcccatatggatgaagtgggctttatagtccgcagtatttctgatatcggttttatctatcttatggctgtcggcggggtgcaggataaaagcaaagaaatgcaggtagttaggttaacaacctttactggcaaaaaaatagagggactgttaaatgttacgaaagatagtgaaggaaatgtaaaagatatgtacgttgacattggatgcgacacttttgatgaagttaaatcattgggtgtagagataggaaatatggtttgcttcgcaagtggtgctagacaattatcaaatgaaaaggtttatatgggaaaagcaatggatgacagggctggctgctatgttattgccgaggtcatgaagaagatgaaagatgatttggaaaacgatatttatttcgttggcacaagcagtgaggaagtaggaatccgaggagggaaaacttcaacctatataatcaatccagacatagtatttgctttagatgtagcaaataatccagaacttacaaaaaattatacaaatcatcgtcttattggaaagggaccaatgattgtgcattatgataagacaatgtccccgaatataaagctcctaaggtatgtcatgaatatggcggatgaaaaaggaattccatatcaatgcgatatgtttagcggaggaggaactgatgctggaaatgcccatttagatcgaggaggaaaactatcattggtcttaggaataccattaagatattgccatggcgcatattcttttgtccatagtgatgatttggaaaatttaattaaacttgtatatgagctgtgttatcgtttaaaacatgaaaattacgaaaaatttatggattttttaggaggatatgaaaatgactgaagtagaacaaagcattattatggagatgatttcttccgcaggtgaaagtaaggtaaaatcttttgaagcattaaaaaaggtaaagacaagagagtatgatgaggctcgtaaattattaaatgaagccagagaggcagatttggctgctcatcaaattcaaacaaagattataactgctgaattgtcaaatatcgaaaataaacctgaagttgggttattaatggtacatgcacaagaccattatatgactgctcaattagccagagatctaattgaggcgttaataaatgtatttgaagaaagggaggaaaaataaaatgaaaattgtattatgctgtgcaggaggtttttcaacaactatgcttatggatagtatgaaaaacaccattaaaaaaagtgaaaaacttaaagaggaggactttatattcactgcaattcctgtagatgttcttgaaagtgaagtagaagggtgtgatgcggttgttgtaggaccacaaattgcacataagttggattatattaaatcaattattgatccacatgagattccttatgttgttgtagataaggagacttatggcaagatggatggagcaacagtattaaaaaaagttcttatagaacgtaaaaaagctgatatgaaaaaaataaagtaagaccagctaataatagtcaagttaattttcaaaaaaatagtttttggaaaaagagtatggcaaacaaaccgttccaaaacacgaacggttacagaaattggaataaaattaagcgactttgtttaaagagttattttccaggaacatttgcttatgtattttgggatctctttgctcaaacggagtttgatttcggagaacagcaaaaatgtagtttataattttatgcattatagcgactaaggcgattttaggctttttgcctt

SEQ ID NO: 135 - DNA, 13074 bp, Clostridium beijerinckii
taaccataacaaatttgagtctatttttctatattttttcacttaataagtgaagttttgaatttgttaagaacagcttaacgagccatgcaaagcatgtttcatataattttatgaataattcaggtttatatatgaagaaagtaagatttttggaataccaattgaaattacacagcttacactaaatacaattctaaaaataaagtttaaaggaaatattggagaatgtaagaatgtaataaaatatgcgtgtggaagagcatattcaaagggccaaagaagaaatgggaatatatttgtaacattgcaggatataccaagaaatatatacattgagaatgcagaaatttttaagtttcaaaacaataataaaagcaaaagtattgtattttcagacaatagcaatatacatgttcaaacatatgaagagagtaagcaaagcataattaagcaaagtatattagagtgttttaagttgtataaattagttgaaaatggagaagtcagcaaagaaggattttatgagaagagttccaatataatggtaaatttgatggataggctagtatttgctaataatgatgaaactaaaaacgtaattatagaatttataatatcaacaatgcaagatatatttagaaatctagaaataaattataatattaaatacgatgggaataatgtgttggctttttcatcatacctatactcaaaaaatgatttttatagcttaaatgaagaggcgttaaaaatagagaataatttattgagctatttaaagagagaaaactataaagaatactctatagtgtataagatagcaagttttatagcaaataggttggatatttatttaactgatagtgatttaattattatgattatattcattaaaactaccgcaatacgtataaattttaataaaatgaatgcaataattgttgctcatggatatgcaactgcaagtagtatggctaatgtctgcaatcgtattataggtgtaaatgtatttgcatctattgatatgccaatagatgcaacagcaatagatgtacttaagcaattgaacaggtatattgaagatgataaattaaaaaatggcttaattgttttatttgatatgggctctcttagcttaatttatgaaaatttaaaagataagattaatattccaatgctttgtatagatcaagttacaactgtgttagctttagaagtaggaaatttattaatacaaggaaaaactattgaagaaatctctgaagtaatgaatgaagaaattaaacctaacatacagttattttatcctcaaaagaataaagaatatgcaataatagcatcttgttttacaggaataagtactgcaattaagatacagaatttactttcagaaagtttagcaggaatagttgatgtaaaggtggttccgtatagttataataatctagtgtctaaaggaaaagatgactctatattcaagatgtatgacgtattagctattgttggtacgtataatcctgaaattgagacaattaagtttatatctttagaagatattatatcaggaaaaagagaagatgaggtgtacagaattttcagtaaggtagcaggacatgaccaaattaaattaataaatgattctattgtgaaaaacttctctttgacaagagttatagatagcctgactattttagattctaataagattatagagagaatagaggacggtattaatgagtttgaaaataatcagaaaagaaaaataccaaatgacaaaaaaattgctttatatgttcatttaagttgtatggtagagagactagtaagacaggctgagatagaagaatatacagatttaaatttgttaattgaagagcatcagagtgagattaagctaattaaaaattcatttagtgtgatagaaaaaagttatagtgtgcaaataccaattgcagagattggatatatctataatataatatatggaccaattcaatgatttcaagcgattaagagaatacaataaagttttataaaaagcatgtcactagttggcatgctttttgcttattaataaggtataaataaaaaaacaaaggaggtgatggtaatgaagaaatttctaattgcaactcatggagaactatcaaaagaatttatagaaactagtaaattaatagtaggatcattaagcaatgttgaatatttctgcatgactaaagataaatcgggagatgatgcagaaaaggaaatgaaaagaattttatctaataaaagcgaagaagaaaagtatattgttttaacagacatttttggtggaagtgtagctaatttatgtaccaatttattgctaaatggatatgaatttgaattaataacaggtataaatttgccaatgattttaacaatactattatcagatgaagaggatatagaaacattggtaaagaacggaatagaagaatcaaaaaaaggaattattcatgtaaatgaattactaaaaaacaataatgaaaggaatgaagaagatgatatcattgatgagaattgacgacagattaatacatggtcaggttgcatttggatggtcaacatcattaggaataaatgtaatattagtagttaatgacgaagcaaaaaatgatcaaatgaaggccatggcattaaacttagctaaaccaaacaatgtaactttgtatattaggggagtgcaggaatcaggtgagatagtagagaaatttgctcaatctaaaaagaataatgtacttgttttagtgaaaaatacaaaagatgcattggaattagtaaaaaattcaggcggagctataaaagagttaaatgtagggggcttgagatatgaagctggaaagcagaagctaacagatttagtagcagttgatgaaaatgatgtatctaatttaaaagaaataaatgatttaggcatagaaattgaatttagaatgctgccaagggataagaaaaagactttatcagatttactaaaataagtaaggaggtaaaaaattatgatagcacaagcaattatgctgggattacttgcaggaataggtatactggatggacgtatttttgggcagataatgcttgaaagaccaataatcacaggtgccttagtaggactaattttaggcgatttaaaaacaggtattattataggagctcaacttgaacttatatggatgggtattgcaggaataggcgcagcaacaccaccagatgttgtaacaggtggtatattaggaacagcttttgcaatattatctggaaatggtgttgaggtagctcttgctatagcagtaccaattgcagttttagcacaatcattaggagtattagtaagaataataaattcttattttgctcaaagggcaagtgtatatgctaaaaaggctgacttcaggggtattgcaataatgatgtggattccggttatgttatttttcctaagcacttttattccaacatttttagcaattatgttaggggcaaatgctgttacagcattgataaattccattccaaagataattttagaagggcttggaatagcaggatcattattaccggctgtaggatttgcactattaatggatatgttactttcaaagaaaatggctgtatttttcttcataggatttttattagcagcctacgctaaattagatataacagcaatagctttatttggagcatgtgttgcatttatattaaatatttatattaacactaaagaaaatagcacagctaagcaggcagttgcaagtaatttaacggaaggggagattgactttgaataagctaggtaaaaaagagttaagaagtgtattttggcgttcattcgctcttcaaggagcatttaactatgaaagaatgcagaatttaggctattgttatgcaatgttaccagttattaaaaaactttattcaaagaaagaagatcaagctaaagctctagaaagacatcttgagatatttaatacaaccccagtaattgttccgacaatactaggaattactgctgcaatggaagaacaaaattcaaataattccgattttgatgaaagcgcgattagtgcaataaagactgctttaatggggcctttagcaggaataggagattcgctcttttgggggacatttagaattatagcagcaggaataggtgtttctctagccagtgaagggaatatatttggaccaatactattcttactattatataatgtaccaggttttgctattagaatattgggattaaaatatgggtaccaattaggagttaactcattagagaagatacaaaagcaaggattaatggaaaaaataatgtctatagcaacaacagttggattatttgttgttggtggaatggtatctactatgttaaaaataaaaactccgttggtatttaatttaaacggtgcaaaagtagtagttcaggatatattagataaaatattgccaaacatgctgccactattatttgccttctttatttactatctattaaagaagaaagtaagcatcactaaaataacaataggtgttatagttggtggaataatattgcatgcaatatggctattataataaaaaataagagaaagaggtaataaaaatgagaatacaagattatatgttagaaactccaactaaaatgaaggagatagtctcaaaatctgatgaattatttaaagaaataataaaggaagatatagataaaattataattacaggatcaggaacaagttatcattcaggggtacaagtacaaacttatttgcaaggaatattagatgctgaagttatagcaatgtatccatttatgataactaaagatacattcaaaggtaaaaacgaaaagacattgataatagggatatcacaaggcggaagtagttattcgacttataatgcaatgaaattggcaaaggaatgtggttgtataactgcatctatggctggatgcgaaaatgctttaatagatgaggctgcagattatattttaacagtatactgtggagaagaaaaagctggagctaaaactaaaggtttttattgcacaaagttaaacttaatgcttcttggacttaaattaggaaaagaaaatggacaaatatctgaagaaaaatacaaagaagaaatagataaaatattagatgctagcgatagatttgaagacgtatataaaaagtcagaacaatggattgagaaaaataaaagtagattagtagaagctaaggaaataagaataataggtccagcagaattatatggtgatactttagaaagtgcattgaagttattagaaactatgagagtgcctgttacaggatatgaatttgaagaatttatacatggtatatataatgcaataaatagtgattcaacaatatttatattagatacaggaaaagaaccaagagtagcaaaaatgattgaagttttatctgaatggacaagcaatatttatgtaataggaagaaatgttgcttcggatgatagaaatctacaaataaatgtgagtgaagatgaacatcatcaaacatttaatttcatagtgccaatgcaattaatatgtggagagatacctaatttaagaggtgttaatccgagtataccaaaagatcctcaatttcatatgaaacttggaagcaagagaattaataaataatctgtaataaaaataattgttaataagttggttgcgtaaaaattctataataattatttaaacgtattgatgaaaaaatgttattaggctaataatttattttgaggtttaattgaaattgaatatattaagttttttgtaaaatttagaacagtaaatagtttttaataaaaataaactatttactgtttcttctatttgaaaagagactacaatacaccattttttatatccattctaattaactagaaagatctatattattctgtgattatataacacttttaattttttaaagactatgcttaataatccaaggaataccttatctcttattgctataagaattataaagtaaatactgcagcaagcaagtatatcaaggatacaggataatatagttccagatataaaattatttataacaaaggttattgggatgaatattaaagagtaacataaatacttaaaattctcaaaagcaaataattttatatttatgttaagttcattttttactaatctatattctaaagccataactactaaatttgaaactaaagttgttgcgattacttttgttggtgtgaacatattggtaaatattaaaagagcattcaagattaaatttaatatccctccaatgaaaactaacttagcgtctgttttttctctcccgaaaatataaattatctgatctgaaataattctatcaattccaatagtcagcatatatactgaaaacaccattagtattggtacggctggaagatatatatcagtacctttgcccataattatgataacttgtttagaaactccaagtaatcctattgaggctggaaataagaacaggaaatatattttaattaccttatttaataaatttaaatagacttcttttgaatgattttctaaatagtttgaaagtctagccatggaaacttgaactattgtaaacattaagatatctatcattgacattatcttttgggcgactccataatatcctgcttctgttgatcctaaattgctatttagcatgtttttatcaagccaagtatataaaatgtatgtgttagcaagtattacaactgaaaacataggttttatatgtttttttatttgtaaatctgagaagtcaaagtgtatcatcttttttatatatataaaactggatatgttattaataaaatttataccgcaagtaagatatatgtaaaataaaaaatcagcctgagtctttacaaaatatattgttaataaattatatattattttaattatcatagtttttaatgctataaaatcataattttcaagagcttcattgatccattcaacattgaacatattaaagactatgtttaatcccataaccatgcaagtataaaaatatgcatcatttctatggaatatagttaaaaagatagcataaaaaatagaagttacagctgttgttgtggtggtaattacaaatagactagtaattgttttggttagtttatccttatcatctcttactttgcttacttctcttaaaccatattgataaactccaaagcttgcgaaaatcataaaaactgcagtccaggtttcccccatggtcatatatccatttaatttatcttgaattgcactaagaactattggcataactattataggtaaaattatatttgaaacatttaatactgctttaaaaaaagcatttttagatattgatctagacataagtatctccttaaaatatattgtattttgaagtttgcaatattatggtaatatagtaagtgaattgtttcaattactatatataaatgtctaagataattgaaaaatataaaatattcagttgaatatgattcaacttacttgattatcataatatgataacaatatggagtgaggaatttgaataaagatttatatgaatttaaagaaataaatgaaaagataaggaagaaattaaattatattaaagctgattcagatattatgtataacaatattaatgaagtaaaagcattaaaaaatgatatatatgaaaagacatctaaggtttttacgtacaatctaagaaaattaattcaactggaatcaacacaaaaaaagttggctggtaaaattggtatatctgaggatttattatctaaatacaaatcaggagatgctttcccatctatagaaacattactatatatttctgaagtatataatataacaattgaaaagcttatttctataccgctaacagcagaagatattgagaacttagaaaataataatgaaattggatcctatatttttgaagagaaatactatgtttatttttttgttactaatatagctaaagaagggtctttgcatgaaggaatcatagaaattaagaatgaaaatgtaaattttaagatttgttcagatgacaaggtaattaaatattttacggggaagtatattgtatccgataaaatgatattttttaatttaagcagctcaaatgatggggttacatatataaatatgattaaaccaaacctaaataaaaataagtatactggtggagttgctatgatgatgcttccctcagatgcgaatagtaaaccatgtgttcaaaagattttatttagcaaaatcaagttgaatagagaattatattacaataacctaaaagagattttaaattttaaaattgatggagttaatttaggtcatgttaagttatctcagtgggaagatgaggcggcatataattttatattaaaactaaagagttctaggagagcttagtgtttcagcactaagctattttttggctatttaggaaattataattcagtaaaatctgtggacgaggagatactccttgagggtataactttttgatcaaagataaaaaatctaaactactatgttataatatattttatgcaaaaatagcattattgaaatgcaactattagaggtaaaagtgatatttaatttataatttatagattaaataaatggctagaatcttatttgtgcttgtcacgaaagaggtgattacttgaaactagaagaattaaagtcaatattatttaaatcagcttcatctactatgaaaagagagggagaggttaaatttaataatggtttagtcacttattttaaggggaaaaagatagataacatatatcatatttatggaaaagttacggataaaaataaaattaacgaatttagtacacatattaaaattaatcttcagaagaaaaaactagagagtgctaactgttcttgtaatgagtttaaagaatttacttcaagtggatatacattaatgtgtagtcatataactgctactgaatataaatttattagcttacttgaaaatgataacaatagagaagaaaattctgaaaagaaagctgcagaaaaatataaaatatggggaaataatcatagcacaaggcttattcgtaaaatagaaaaagattctctatattatgaggtacaaacaccttcgagaagtggaaagcttatacttaagccagaggaacttagaaaatttttaaaaggtatagaggatagaaaaataaaatttaagtttgattatattgaaattacagcaccaatattacacaaagacctacctataacctttaatgttaaggaagataacggaatgatagtcttgaccactcataagcagcttcccattccactaaattcaaacaatgatgtttattattttaggaatgaactctatttaccttcaaaaaatcaaattgataattatgctagtctgcatgaaagattattagttcatggcagaattacctataaaaaagatatagatacttacactaaactaatgtctcttttaagtagaatttcgagtaacataaatattgcggaaaacttaagaaattatgcatctaatttatcaagacctgaattctttttatatgaagggaacggaaaaatttattgtgatatatttcttagctatggtaatacaaaaatcaatatattagatgagagaaatgtttcgcatacgttcataagagatgataaaaaagaagaaaagcttcttatggaagttgaaaaactaagttttgtaaaaatggataacagacttgtatttataggtaaagatgaagagttgtttaatatactaagcaaaaaaggagagacaatccactccttgggaaatgttatgttaggaaacggccttagcaataaaaaaatatataatctggattcaattagagttgatttagatgaagtggacggaagttataatttcttttatagtataggggagttaggaacaaaggaattaaatagtgcattagaggcatataaagataaaaataaattttacaaaacaagaaataataactttttagattttgaagataatggtgtgagaagtttttttaatctaattgaagtgttaaatataaatctggattcaaataatgaaaaagttaaaatcgaaaagaataaagccttatgtctatatgaaaatatgaagaatataggtttagggagtatagaaaattcgaatgaattagatgatatagaaaataagttagacaacataaataataaaaatatatcaatcccaagtgattttaaaggaatccttagagaatatcaaattaatggatttaagtggctcaagaccttaagtgaagtgggatttggaggaatattagcagatgagatgggattaggtaagacaatacaagttatagcattattattatcagagaagaacaaaaagacttgcataatttgtccgacatcattgctttataattggaaagatgaatttttaagatttgcgccaagtttaagagttgtgatgattcatggaagtcaaagagataaagtgatggaagatatatgtgaatatgatgtagtgctaactacctatggaacattgagattagatatagataattatagagatattgtttttgattattgcataattgatgagggtcagagcattaagaattcggaagcgcagaattcaagagctgtaaaagaaattcaggcaaaaattagatttgctttaactggaacacctattgaaaataatttaacagagctttggtctatatttgactttataatgccaggctacctctacgctaaagaaaagtttgaggaaaaatttatttcaagaagggaagagaatttagagaatcttaagactatgataaagccttttattttaaggagaactaagaaagaagtaatgaatgaattaccagataaaatagaaaaaactttattagttgaaatgacaccttctcaaaaagctgtgtatagtaattatgtaaaaagagtaaaagctgcaatgaaaaataacaaagatggtagaatcgagatattctcatacttaactaagctaagggagatatgtttagatccttcacttatacttgaagactataatggaggaagtgggaaaatagaagaagtagtagaaatcattaaaaatcatattgattctggtgggaagatacttctattttcacaatttacttctgcattagataggattggggatcgcttaaataaggagaaaatagaatttttccatttgagcggaaaaacaaatcctaaaaatagaataaaaatggttaaagattttaatactaatgagtttgtgaatgtctttttgatttcattaaaggctggaggaactggacttaatttaacatcagctaatttagttattcattttgatccatggtggaatccagcagttgaggctcaggcaacggatagagctcatagaattggtcaaagagatgtagtagaggtgattaagttagtatctaaaggaactatagaggagaaaatcattttgcttcaagaagataaaaaacaacttattgacagtattttaacgggagaacttaaaaatagcggcttattaggaagtttatcaaaagaagatttacaacaattgtttgagagagattaaataattgttgtataaatataaaaagatattagtaagaaataattatgttgaatgaagaaaagctggctaggtttttaatgttaattgaaatctataaaaattatatatttctatgagtataaaattatctgaaaaatattttcagataattttattatttaaaggaatatttgaaaataaatacctgttttgattgcatgtatataattatcaatagttatctactataatgtaaatgaacaaaatgtaatactaagtacgaagcataaacgtctaaagattaggtcattcttctacctggcgatgatctaacttattaaattcgtttaggcgatactccatgtttttttcataatctttgttaaagatacaagagaatatgacatctaaaacatattgtgtagcaatatgagatgaatagtgagaaattttcttttttaaattttctttgctagaaacaaatatatgatatttaaataacttagttaaatagttttcttgagctgaacagataactaaggtttctatttccttacgttttagaactaaagcaatttccttaatttcaggtgtcttaccagaataagaaagaataattgcgacttgcttatttttattattagaagcggcagcacggtatacttggttcattggaattagtgaaacattaacgtatctaccgatgctttgcattttatcttgaaagttcaatgccgtttgtatgttatttgtaacggcataaacatcgactatctcggcattataaattaaatcaacagcatcttctagctgttcggaattaaagaaggaaaaagtgttggttaaggtatcaatataaagctgcttaatgttactagcgatttgaaactgtgtatcgtctttcttgaaaggaaaatttatatcaatattttctggcttattcatttttgagtatagttcttcaacaaacttgattttaaattctttgaaaccagttaatccgatttttttacatagtctgtgtatagttgagattgatgaaaaagatactttggctaattcatctagtgacataccagcaacttgctcctgattttccaatatgtaatttgcaagtaatttctctgtttcagttaaattattagcatataaaagtaaattataaattgtcatgatgattatctccttggtgaagtttacatttttagatgaattattttattaatgaatgtcgtgaataaacaattaaatttgtcattaatactttttaaggaaaagtattatgtatgttgataaaataattgctcatcataattctaaaaataattaaagaattttagctgcaattatgaaatatccattaagaattgcaacatatatatttattttagcattaataaaaattatt

SEQ ID NO: 136 - DNA, 12994 bp, Clostridium beijerinckii
taaccataacaaatttgagtctatttttctatattttttcacttaataagtgaagttttgaatttgttaagaacagcttaacgagccatgcaaagcatgtttcatataattttatgaataattcaggttttaaaaatattacacgaattttagctataattatgaattgtgaaatgtgcattgtgaatcgcaatatatatatatttatattttgtatattcataatcaaaaaccttgaacccctgatgtttccaataaatatttacatattttcatatgtatatttaaaaatatgaatctttgaaactatttttatataaatctatgtacctttaaaaatgtgtttatagaaatatattttcatataaatatttaaacatagtttaatttttatatatttttctagaaatatttttaaggcacatgaaagaaataataggccaaacatactggcctattatttcttagctaaccctatattaatgcttcagcaaatccttctgcatcaaatttttgaagatcatcaatgccttctccaactcctatgtatctaacaggaatatttaagccttgctttatagataaaacaacaccaccttttgctgttccatctaatttagttaatattattccatctatcggacaagcttccatgaactgctttgcttgaataacagcattttgacctgttgttgcatctaaaactagtaacgtttcttttctatagccttgcaattccctgtcaattattctgtttatcttttcaagctcattcattaagttcttcttattatgaagccttccagccgtatcacatattaatagatcaacatttctagcctttgacgcttctattgcatcgaaaacaaccgcagccggatccgatccttcctgatgtttaactatatcaacttcggctctagagctccacacttcaagctgatcaatagcagcagctctaaatgtatcagctgcagccagtaatactttttttccttcttgtttattctttgctgcaagttttcctatagatgtagttttaccaacaccatttaccccaattataagcattactttcttttctttttcgtcatcttcatatgtaccttcaagtaatatatctctaatcacttcctttaatgccggttttacttcttgaggatcgtttattttttcttttctgattttcccccttaatctttctataatatctactgttgtgtccataccgatatcagacatgattaatatttcttctaattcctcatataaatcctcatctatagttactgccaaatttaaggcctcatttatcttatcggtcaatccatctcttgtctttgctaatccctcttttagtttattaaataaatttccaaacaaattcatttcctcctaattaaaattttctgctcaagtgaaacttgatttaagataagtcatctcatcttaaatcttagtctaactaatccagaagcttgcagccgttacctcttactaaaagtaggaggtttacggatgctagctatcggaaaagtctactgaaactacctttgatacacctttttcttccattgttactccatatataatatcacttacctccatagttccctttctatgagttataattataaattgagtatttttagaaaacatttttaggaactctgcatacctatatacatttgcatcatctaaagccgcttctatttcatccaatatacagaaaggcgttggtttcatctttaaaattgcaaaaagtaaggctattgcagatagaaccttctctccaccagacatcagattaatattttgaagtttttttcctggcggctctacatttatgtcaatattggctgtaagctcatcaccttcacctaaaataagctcagcgcttccacctttaaacaaatctttaaaagttttatcaaaattataattcaatattttgaagttttctttaaataaacttttcatttcattagtcatttcttcaataacggcatttaattcccttttggcattttctaaatcctctgcctgagtagacataaactcatacttttctttaatttcttcgtactcttctattgctgctaaatttactactccaagttttgttatctttcctttagtaacaaaaatttcttgtttcaaagcttcctcatcaactactggctcacatttatctaatgcctctgcataagttaattctaactcttcattaagtttcttataaacatgctccctatcattttctttcttagctttaattacttctcgcttattaacttccatttcttttaagcttacttcatccaaaataccgcttattacattatctttttctttaaattcttgctttaacttttcttttaatatctcatcatctttaaagtttacttctaaattgctgatattaatattattttcttcaatattcttattcttagcctttatatctaaatttaaactttcaatattttttttattttcctcattttcattatttaaaatttcatttttaatctttaaatccttaatttctttttctattcttaaaaattcattctttttattttctattgcctcatccaacttagccttactgattttcatttctgtaagcttagtatcgctatcgttaacttcttgaactttgattttcattaactgttccagttctatacttttgctcttgttagctgtattttcactttcaatcacctgaacttcagattctttagctctaatcttttctaatatagcttctctttcgcctgctattctttttatttcttctttagcagtttctagatttctctttaacttatccgtatcagactgtaaccctttaatctcactttccttttttgtaagttcaatatttttctcatgaacttcatcccttttattcagcatatcctcatctaggtcttgtatttctttcttgatatcttgaactagtattttcaattcctcatatttctcttttttattgcttatatctaatactaattcttcaatttctctttttctacctagaacatttgaatttttcccctttatgctaccacctgttaacgccccccctggatttatgatttctccatccaaagtaacgattctataattatattttccgattcttgcgatattaagagcgcagtccatatcactgcagattattgttcttcctagagaataatccattatatttttatactctttatcataagatattatgtcacttgcaatcccaatatatccattagcttcagttatacttctatctagttctaacttctttccttttataatatttaaaggtaaaaatgtcgctcttcctagactattttttttcaaatatcctataagaacttttgctatttcttcattttttgttataacatttgaaatcgcagcacctaaagctatttctatagcaacttcatactttttacctacagtgaaaatttcacctaagactttagtatcatttgcagccgtaattctttccctatgaattgattccattaaagattttactgacctgttatatccctcataatgcttttccaagttttctaacattgatctatttgcatcaagttttgttaaagtcccacttaattctctaagctcattttcttttttagttaaatttgctgatagagaacctatttttttcttatgctctactatttgcatatttagcaattttatattgtctttattcttttcaatttcattggttaggtctttataagtcgctaaattaataacaatattattttctagaaaagatatagacgaatttagggtttcttttttctcttctcttagcgagagatctttatttagcatagtaatctcattcttcatatctgagttacttcttaaaagttcaaattcaccttctcttagagattttatttcttcatctatacttttaagttccttagaactttttatattgttttcttctaaatttactatatcttcttctcttaatctttgttcctttagtctttcactcaattcactttctaataatttcttgttttcattaagctgatttaccttaactaaaatatcatccagctcataattattcctattgatcttttcttcaaaactcttaattctttctttataaagttctatacttttttcatcttcactaacagtttcttttaagctataatatttctctttttcttctaaattcttcttttctagcttttctatttttatctctagttctttaagttgtgacttataactagatacttctttacgcttatcttcaatttctttaatttttaaattcaaatcttcattgaacccttttaattcttcttccattttgtctatggtatgtactataagtgatacttcttttttcttcaaattattagataagtcagtaaattctaatgctttctctctttcaatccttaggggttctattctctcttcgtaagttgacagaatatcatttattctaactaaattttcatctgtattgcttaactttttctctgcttcttcttttctatttttaaactttacaatacctgcagcttcctctaagagatttcttctatcttccggcttaccacttaatatagcttcaatcttaccttgtccaattagtgagtaaccttccttaccaattcctgtatccataaaaagatttattacgtcttttagcctgcactttgaattatttattaaatattccgattctcctgatctaaatattcttcttgatacaactacctcgttatattctgtcgcgagcttttcatcactattatcaagggttagtgaaacctgagcaaggcccactggctttctaaactgcgttcctgcaaatattacatcttccatttttccgcctcttagaaccttaacgctctgttctcccagcacccatcttaccgcatccgaaatattactctttccacttccgttaggtcctacaacagctgtaacgccttgtttaaattttaattctgttttatcagcaaaagatttaaatcctcgtatttctagagattttaaaaacatgtgtcctctccttaaaaagaaaatatactaggtaataatgttacaataaagattactacaataaaaatagtcattgcaattatcattttttctctagtcttttttttcatatcaaacaactccttattataatttagtttatagtaaagcttattaaatatcaataattcacacaaaagaaaataccaatttaaacttcataaacataatcaacattttaaaagcgagagtctcctctcgctaatatgctatatctaactttctattttttagacaaagttttatatgacctctttcaatattatcatcttgttttacatcaataattttcccattatctttaagcttattgaaatatgttttcttattagcataaagcttacttaaatcctttgagttaatatacagaactccatttttttcttcacccatattttctaaaatgatatctgacaataaactgccctcaaccaattccctaaacgatggatgaaatggacctgccactatatcttttccttcatttatactttctgtcggctgaagaccaattcttattacgttgatgttatgctttttatacatatcatacataaccttacttacattaacggcctcttcaagagaatatggaatgtactcgttattaatatacattctttccattggagtatcttttataactaacgacggatatattctacaaatatctggattcatcttaattgattctttagtcgtttctatatctctttcaaaagtatctccaggtagtccaggcattatttgatgtcctaatataaatttatattcttttattaatttagatgcatctataacatcatgaacgctatgtcctctgccagctttttttaacacttcttcatttagtgattgaactccaagttctattatgtcaactccatactctttaagatatgtaagtatataatcattgatgtaatctggtcttgtagaaagtcttattttatctataagacctttttccttaaactcctcagctacttttagaagttccctttgtttttcttccctaatccctgtaaatgtaccaccaaaaaatgaaatttcaatagttgcatttttattctttatagtttctagataatcatttattgttgtaattacagaacttgccgtaacctcttcatcatcaacacctgttattctatcctgattacagaatacgcaattatgcggacatccttcatgaggtacaaatatcggtattatataataatttttactcatgcttaccttccaatatatctaatgcctgtttagctgcattttgttctgcttcttttttactatagcctgaaccttcacccattaattttttatctatcactacatttgtaaagaattttcttctgtgaggtggtccttcaaattttgtaagctcatattgaattactacttctccatctttttgaagaagctcttgaagctttgtcttgaaatctaatacaatttcattatttattgctttatttattatctcttcaaaatgaagcaatataaaatctcttacaaaaccaatgcctttgtctaaataaacagcagcaatgattgcctcaacagcatctgcttgtattgaaatcctttctcttccgcctgtaatttcttcacctttactcattctaatataagatcctaagtttatcttttttgcaatttcgtaaagagaattttcacaaactatcaaacttcttatttttgtcagctcaccttctgttttatgtttgtaattattaaaaaggtattctgtaatacaaagctgcaatactgagtctcctagaaattcaagcctttcattatactccgcatccttgaattgatttccaaaagagctatgagtaagagctgtttttagtaatgtgtggttattaaaaaaaacccctaaattttcttctatttctttaagtgtatatctattcatgtattccactccttgaagtttattcttcaacttgctaacttattgctatatacttctcataacaaattcaagaataaactattaatttgatattttagttactataatgatttttcttcctaaattccaactaaaaacatcgttatcatagacagtaacatttgtacgccaatatattactaaagtacatttctcactaaaatctattttaaaatgattttaaatttagttctcactttgtaaaatataaaatcccgcaagatgcgggattattttattcttcgtgatgagcttttacgtaattgacaacatctccaactgttttgaagttttcaacgtcttcgtcaggtatttccatatctagttcatcttctagagccattataagctcaactatatctaatgagtccgcatttaaatcttcaataaatgatgcttccataacaacgctttctacatcgatacttaatttatcagcaataattgcttggatcttttcaaacatttgtttcacctcccaagttctacatttagataatattatatattgtttaaatcgtcaatattagtttcaatatattttaactaattttccgaagaaaattcatttcttatatcttttaatacattattatcatagaaaattttagtttgtttaatggaattcttaaacgctcttgcatcagaactgccatgagcttttatacaaattccatcaacccccaagaacggagctccaccatattccttataatcaaactttttcattatattttttagcacaggttttagcagaaccacccctattttagatataatcgacgatttaagcacctcatctttaattatacctaatatactcgaagccgatccttcatacatctttaaagctgtattccccacaaaaccatcacttactaaaatattagtgtcaccagtaggtatttctcttggctctatattccctttgaagtttatggaactttcttccttcaaaagcttaaaagcagcttttgtaagttcatttcccttttcttcttcttctccaatatttataagtcctatagtcggatttttaacgctgaaaaccttttgataatatatttttcccatctttgcaaattgcaccaaaaatgaaggtttgcaatctacattagcaccaacatctactatcataaactttccacgtcttccaggcattataggtgcaagagcaggcctttctattcctttaattctacctattatcagcgtacacccagctaaaaatgcacctgtactgcctcctgatacaacagcatcacaaataccttccttaactaagtttaaagccttaactatacttgaatctttcttctttcgcaaagccataacaggatgctcattagttgaaattacttcctttgcatctaccacaataactttttccttgggataagtatatttagctaattctatatttagaacctcttctggacctgtaatatataattggatatcatcatatgccttaagagcttgaatagcaccatctattactgctacaggtgcattatctccccccatgccatctatagctattttcatctgaatacctcccttcttccactttaattataaataaattaatttaattaataaatagaatattttcttttttagataaagattatttaacttatacttatgtgatatagataacccaactaagacctgaacttatgtatataacccgccgaaatgaataacatacttttgttccagtttctaggtaattatgatgggtgattctaaggctataaagttgcacccaaagtgctagcctcaaagaacaagctatgaactagcacatttggaacaacttatagccaaagaatcacatccatcaaaatcaccaatgaaacattccacaaaagtatattacccatttctagttgggatatatttcatagtataaatctaacttataattggcttatctatatagggttccatattgataccaatacatatctactgttcgaatttcctaaataccagcgatattgaaattttataagtttgaatatcattgtggaaccctatagtaaacccaaagtagaaacatctttatttctcagaaccatgaaaatttcgctaagaagttttaagtataaatttaatagcacaacatatatctatatatatttctttatataagaaaagaaagtcataaagactttcttttatttttcagaagctacaacttccttacctttataataaccacaatttttacatactctatgagcaagtttcatttcgtggcattgtggacattcaactatgccaggtaaactagctttaaaagtttgagctcttcttgcttttactttagcttttcctgattttcttgctggacaacccattcattacacctccttattatcaaacaaacctttcaaggcctcaaaacgtatatctacatcttctttttgacatgaacatgaattgtgatttaagttacatccacattcttgacaaagccctttacagtcgttcttgcaaactcttttaataggtagtgttgaaattatgctactttcgacaatttctgtgatgtctaaaacatcatccattacaacaatagcttcatcatcaccactatctctattagttgtaaacctttcttctatatcaatatctattggatagataaaggtatctaaacatcttgaacatatcatttctaaatcagttttgattttagcattcaatattaatatatcaccatctgataagatattcccaacaacttcaaaaggttttattggtttaattatatctccttcaaaatcaaattgcggtgcatcaaatatatagtcaattttcttgcttctatctttacctgaaataatatctgaaatttgtactttcataaaatcacaggataaccatataataaaactaatgtaaactatataatatctcctctttcactccttagcacatatatttataaaacaaacacaactaattatataaattgcgtgctaaaaagtcaagaaatttattataaattcctatttctccatatgaaagaaaacaacaaactcatgatacaaatgtttttgtatctatactaaccgctcccctttacgtatatattttcttctataaaggaagtacagccaaatatattgtataaagctattgaaaaaacatgctgataaattataaataaaaaccaatcagcatgttaactcaccattttttcaattatgccttacttaactaattctaaagtttctttagcaatcattaattcttcgtttgtaggtattacaactacttttacctttgaagtttctttagaaatttccataccatctccgatattatgactttcgttcttttctaaatctacttctattcctaagaattccatattagttaaagctcttgatcttatttctggagcgtgttctcctattcctgctgtaaatacaattgcatctacaccacccattacggcagcataagcacctatttgcttcttaacttgatatccgaatatatccattgtaagtaatgctctaggatcattatcattttccactgcacttctaatatctctaaaatctgttcctattcctgatatacctagaacccctgatttcttatttaagatatcatttacttcatctatagaatatcctttttcttttactaaataagtaactattgctggatctatgcttccagatcttgatcccattataataccatctaatggagtgaatcccattgtagtatctacagattttccaccatcaacagctgtaatacttacaccattacctatatgacaagttactatctttaaatcgcttatgtctttattcatcaattttgccatttcacctgctacatacttatgagatgtaccatggaatccatatcttcttacgtgatcttctgtatataattcatatggaagagcatacataaacgctttttctggcatagtttgatggaatgctgtatcaaatactgctaccattggagtttttggcataagagccttacatgcatttattccaattatatttggaggattatgaagtggtgctaattttgtaaattcatcaagtgccttaattacttcttcattaattactactgaagttgcgtatttttcaccaccatgaacaactctatgtccaacagctgatatctcatccattgaacttattacaccatggttttcatcaactaagcattttaaaacaagttctattgcatcttgatggtcttttaatggcgtttcaactacatatttatcttttccttcaactttttgagtcaatattgacccagtaattcctattctttcaacaagtccttgagctaaagactcttcattactcatatcaataagttgatattttagtgaagaactaccacaatttataactaatactttcataactctactctccttttaacattcaaaccttttgtatttttgttttaacaatctataagctaacttactttaaattatctgtaaaaataatacttactatttgtttgtttgagcttgaactgctgtaagcgcaacaacacttacaatatcatctgagctacaacctcttgataagtcattgattggttttgcaaaaccttgacagataggtccaatagcttcagcatttgcaaatctttgaactaatttataacctatatttccagcttgtaaatctgggaatactaaaacattagcttttccagcaacagtactttctggtgccttttgagctgctacttttccaactatagctgcatctaattgtagttcaccatctatatctaagtcaggtctcatttcttttgctttttgagtagcatttctaaccttatcaactaattcattatcagcacttcccatagtagagaatgataacattgccaccttaggttccatgttacataaattcttagctgtttctgcagtggctattgcaattgctgctaattgatcctcgttagggttagggttaactgcacagtctgagaatattaatgttccttcttcaccataagatgatcctggaacttgcattataaagaagctcgaaacaacagatacccctggtgctgtctttataatttgtaatcctggtcttaataaatctccagttgtgtgaattgctcctgataccattccatctgcatcatctaatttaaccatcatcgtaccaaaatatagaggatctctgactattttatctgccttttccattgtaacgccttttgtctttctaagttcatagaaggcttcaatatacttttctaatttatctgattcatttggatcaataatctcaattcctgataaatttacatctaattcctttgccttattatttatttcttctttgttacctattaaaattgggtaagctaatcctaatttttgtattttttctgcagctgctatatttctttcctcgtttccctctggaagaacaattttttgtttatttgattgtgctgcagtccatatttttttcataaggtccataatctatttatctcctctctatatcctatctctaatactaatatactcctttatcagtgcttttttcaacacaaattctctataaaatagaagtctttagatttgaaataatctaaattgtcagacaatactcctgtaaaataacaatataggaaaagtataatttttaacaattaaattttatttaaaattattttataatttattattaaacgctatcaaatgttttaaattattgacctaatatatgaaaaatacatgtctatttcatattattttcattaactttttcttaaaaatctatagtatattcattcaactagctgtgtataatctattttcttgccaatattaagcaataattaaaaattcaccattcttttaat

SEQ ID NO: 137 - DNA, 12814 bp, Clostridium beijerinckii
gcacgccgccagcgttcgtcctgagccaggatcaaactctcaataaaaagtttaatcttagcttactcaaataaaaattgctggtttacttaaatgtatttatgttattctgttcaattttcaaagaccaattttctttcctacaattctcattgtagttattaatttatgtcaccctcaagcgacttatttagtatatcacttattttatattatgtcaatagcctttttcaaaatctttaaaatcatatttaagatacaaatctgcgatttatcattaagttatttacatatctcagcgacgttatttatcttaacacgttcccgttatgctgtcaacatatttgttaaaatattatgtgatgtgcatactgttatccccttattacaaattagcaatgagattatacggcttaatacttataataaattccagattaaatttactttctaaatttctctaagactaacagttctgtgtcactatatcatgtttatactataaatttatacttctattagttccataaataaaatagtaatccataatgtataaagtttttaacataccttatctatcacataatagacatattaaagttgtattgatataaataaagtaagcatcataaaattatactttgctaacattatttcttagttgttaatcactatatcgttcaaattctgcatttaattttcctaatatagataatactaacttaatgaatcacaaatctaattttctgatacttacctaattaatattttataataatataactattcaatttctaaaaatagtatcttctatatatctttacttagtaatactactttttttctttataaccaaaggatacataactgatccaataagggtctcaccacttcttatctcgctacctttatctgcaattacattatccaatactgcatcgtcaccaattctgctattttgcattattatacaatcttttaactttgtattttttcctatatatactcttctgcctattatgcaattttcaatcgttccttctattctacaaccatttgctattattgagtttataacactgcttgtatctgcatagtgagttggagcttcatctttagtttttgtatatataggtctttcatcattaaaaatttctttatttacttttctatttaaaaatcccacattgctatcatataatgccttaatggaatttatacaatctaaatgtcctttgaattcgtaagcacttgctgttagtgtatttaaattattatgaatatactctttgacctttcgatacattccactgcttacacattcatttacaatatttataaataattcagtttttaatatatacatctccatattaatatttgccttcggacttttccctatattttctcctacacttataacgcttcctgaatcatcaaagtttaatacgccacaatcaccaaaagcttcatctgcattgtttaccttcttatataccattgtaatatctttacctgtactcttatggtattccaaaacttcattgtaatctatattacaaatcatatagcttggtgctaataatacatactctcttctactatgtgttaaaaattgtatgttttcagcgaaattatggacatcatcataaacaggctcgtcatttccaaagttaaaaacttttaatccatctttttttctatttaagtcccatggtcttccatttgttaaatggtctattagagaccttgacttattctttgtgaatattcctatacaattaattcctgagttagtcatatttgataaaataaaatctataattctatatcttgctgcaataggaactgaagcaagagatctattaactactaattcacccattctgttttcattttcatctaagttgattataccaatacaatttttcatttctttctcccccttagtgatctcgctaaactgctttattattttctataactgtacccatttttacttcttcttttgctgcaataatagctatttcatcacctaaagaaatcttacagtcttttcgaactattgctccgcttccaacaattgctttttcaataactacattatcacctattttagcatccgtcataattattgaatctcgaacaactgagttttttcctatttgaactccttgaaataatattgagctttccacttgtccattaacaacacaaccttcaacaactaatgaattagatacttttgcattctcgcctatatattgtgccggccttactggattgactgaatatatcttccattcctcatcatgtaaatcaagttcattatcttctcttatcaaatccatatttgcttcccataggctatctatagtaccaacatctttccaatatcctttaaatggataggcaaccattttattcccattaccaagcatacttggaattatattcattccgaagtcattttttgatgtcttgtccgattcatcctctctcaaatatttttttagagttttccaattgaaaatatatattcccattgatgctagattattttttgggttttttggtttttcttcgaattcatatattgataaatcttcccttgtattcattattccaaatcgagatgcttcatccattggcacttcaataacagctatagttgcctctgcctgtttttctttatggaaatctagcatctttgtataatccatcttatatatatgatctccagataaaatcaaaatatattctggatcatatctatcaacaaattctatattttgataaattgcatttgcagtacctttataccactctccgcctttttcttcttgatatggtggcaatacatgtacccctccatgagccctgtctaaatcccatgcttctcctatgccaatatgtgcatttaattctagcggtttatactgcgttaatactcctactgtatatattcctgaattcgaacaattgcttaatggaaaatctataattctatattttcctccaaacggtactgctggtttagccaatttttttgttaatacccctaacctcgatccttgtccaccagccaatatcattgccacaatttcatttttacccataatattatctcctctcatatgtgtttgttctcattagataaattttatattatatgctcctatgttcaaaaaaaatgattattattacatttttatttaagtgaacttgcagaagcatattatatttttaataattattttataatatgattacccctggaatttatatttatagttttgcatacaatatattatacatttattttccattaaattccacataagcatatatcaaaatatttgtcaattttttattatataatcaaactcaatgaactagatcctacgcaatattttcaaatcatatggaaagatagttataacgctatcacttcctgcaaacttatacttttcactaatatcaagtaaattcacataatctccacttaagttaatttctttaattaatttagcttcgcttgaaacatttactaatactattacgctttcattttcatattttctttcaaacgcaaatacgtttggatcagtttcaaagatacttaacttccctttttttaaaccatcttcattatttcttattttaattattttatggtagaaatcagcaagcattttgttctctttcccccatggatagcttctcctattatcaggctctcttccaccttttatgccggcttcatctccatagtatattagtggtactcctggcaaagtaaattgaattgctataagtaattttaacagtgatatattttcatccagaacagttaaaattctttctgtatcattggtacctaaaatatttatatttccataaaaactttctcttggataattctcgtacaatgacataattttttgtcttaacttatctgactttatataccccttgataaaattaattaaactttcccttaagggataattagttgcagcttgcacttcattcccttgtaaatattttcgtcttcttgaataacttatcttattagatgcgtcttcccatatatcacctaaaagtacagtatccttatttatttctccgattttctttcttattagttctataaattcatctggaagctcatctgtcacatttaaaaaccatccgctaactcccatatctgtccacttatttataatagaattatctccacttataatatagtcaacatattctttttgcatcgagttaacattcggtctatcatccattccccaccaagattcatacctatatggatatgtaataaatttataccaatcataaaatctagagtttggtgaattatacgctccaacatcgtcgtaatttcctagtttattaaaatatttactatcggagcttgtatagctcagtacaatatctagaataattttaattcctttactatttgccactttacataattctctaaattcaccatttgtaccgaacatttcatctacaatttcatagtccgctgtatcatatttatggcaactaggggatttaaatattgggcttaactttattatattagctcccaattcctttatataatctaatttctttattatcccctttagatttcctccataaaaatcccacctagcaatttttccaaaactatctctaatatacataggactatcatcccatcttccgtatataaatgagtttccttttatattatctataattttattttcatttccattatagaatctatctattagaatatgatatattacaccctctttataccatcttggtacgaatgacttttcatatacagttatttgatatggcacaggattataagtatatatttggccaactcctcccaagtgattgtcattatttccataatatactctgtcatacccatctattaaaataaaatagtattctaatatccccaaagcatcagatgtatcaatttctacagaatatttaaattcaccattatttaaatattccttgttcattcccatattcattttagttccatcgaattttatcaattcgattgctacaattatgtctttattaatattaatagatatcttaaccttttgaccagcctctacagcgccaaagggccttctaaatcttatgctttgagagtcatgtaatacctgtatatcattcattcagttaatcctcctatagattcttatagattacctctgatccccaaatacctgttgcatattcttctattgttctgtcagatgagaatatccctgaatgtgcaatattaattccacacattctttgccacttattagcattcctataaagagtatcaatcttatcttgagcttttaaatatgagtcaaaatcttgtaaaacaaaaaactcatcattataatttattagattttcatatataattctaaatttatttttatcactatgatattttccgtttattaaatcatcaattacactttttactctaatatcattgttgtatatatcaatagatttatatcctccatttttgtaataattcaatacttcatctgcagttaatccaaatatcactatattatcatctgtaacttcatcttttatttcaatatttgccccatctaatgttgctactgtaatagctccgttcatcataaatttcatatttgatgttcctgaagcttcttttgttgttgttgagatctgctcacttacatctgttcccgggattatttgttcagccagcgaaactctataattttgaatgaaaacaacttttatcttttcatttactctagaatcattatttattttgtttgcaacacaatttattaattcaatagtatttttagctaaataataacctggtgcagcttttcctccaaagatgaatgtccttggaactatatcgtaattaggatcatcaattaatttattatataaatccattattcttaaacaattaagtacttgcctcttataagcatgtattctttttacttgaacatcaaatatagaatcaggatccactcttacattatcattctctaatattatacttgctagcttttctttgttaaattttttaatttttcctaactgttctagaatcacttcatcatacaaatgcctctcaaagttctttagatcaagtggatgtcttataaagctatctccaattgtatctttaattagttttgtaagctctggattgctttttaaaagccatcttctatgagtaattccattagttttattattaaatttatttggataaagataatagaagtctgtcatctcttttttcttcaatatttctgtatgaagttttgctaccccatttacactatgactgcctacaatcgctagatgtgccatcttgacttgctcatcagctattatcgccattcttctaactttttcaaggttgcctggatatttagttaaaagttctgcacaatatcttttattaatttcttcaacaatcatatatattcttggaagcaatttttgaaacatgtctattggccatttttccaaagcttctgccaaaattgtatgattagtatacgatattgtattagttgttattctccaagccgtatcccattctaacccttcttcatccaataatattctcataagttctggtatcgcaagtgtaggatgagtatcatttatatgaatcgctactttttcatctagtaacaatatatcttttccatgctttttacagtgccttacaatgctttgaactcctgctgaaacaaagaaatattgctgctttagtcttaacattttaccttcataaaatgaatcttctggatacagcacttgcgaaactgattcaactgaatttttatacttaattgcttggagaaaatcacctctactaaatgatgaaaaatcaaactcgtttgaaaccgcctccgcactccataacctaagagtatttacaatttcattttcgtaccctacaattggagtatcatatgggactgccaatacaggctcataatttatatgcataaagcttaagcgtccatttatttcgcttacttttacctctccaccaaacttaacaatttctgctttttctgcttttctcttctcccagacgtttcctagctttaaccaatcatcagatacctcaacttgttttccgtctataattttttgctgaaaaaatccatatttatatctaatcccacacccgtttcctggaatatttaaagatgccattgaatccaagaagcatgctgcaagtcttcccaatccaccattacctagtccttggtcttgctccaagttttccaactcttctaaatttatatttaaatctgataacgcttctttacatatatctcttatgcctatatttaataaagcatcaccaagtaaccgtcccagtaaaaattccatagaaaaataataaacttgcttctccccagtcttattatattttttatttgttttgagccaagttcttgtaacataatcccttactaaacttcccaaagcatcatacttttgttgattagttccttcttttaactcaataccatgcatttctaaaaacttatttacataagcttttttaaatgtttttttatccatttcgagcattgatataccccctcataacattatgtcctcatcttaatcttgtcctgttaattctctatataaatctaaatatatttgagctgacctattccagctattatcagaattcattgcattttcgattagattttcccacttacccttatccttatatatccataacgcatattctattatattgtataactcatctgaattgtaatttctgaaactaaacccattaccttctccagtatactcattatatgcaattattgtatccttaagtcccccagtttccctaactataggaatagaaccatatctaagtgctattaattgccctaatccacatggttcaaaaagtgaaggcattaaaaacatatcacatgctgcataaattttatttgctaacccattatcaaatttaatattagcagacaccttatttccatatctagaatctagccatttaaaatgttcctcataatgcttatctcccgttcctaaaataactagttgaacattttcttgtaatagtttatccgaaatatttactaatagatccattcccttttgacttgtcaatctagttaccatcgccagcattggtatatttttatcaacagttagccctagctctttttgtaactccgttttgtttattgctttatcttcaatagagtttatactatagttctttttaataaatttatttgtcttcggattaaattcatcataatctataccatttgttattcctcttaatgcataggatctctctcttaatactccatccaatctttgaccatactcaggtgtttgtatttcgtatgcataagtattactaacagttgtaataatatctgaatagtataatccacccttcatataacttacaccatcatcaaattttaggcatgtgttattataaagctccatatcaaatccaaataactccggtaatatttgaggatcaaatactccttgaaatgctatattatggattgaatatacgcatttcatcttccaatagaacatatcatttcttttatattcaaattttaatagtacaggtaacatcccagtttgccagtcattgcagtgtataagatctggctgccaatctatttgcctcaacatgtctaatacggccctatcaaagaacgcaaatctctctgcatcatcatagaatccatagacttcatctctcttaaaatatgcttcattatctaaaacataatatgttactccattatgaaagcattcccatacgccacaaaattgttctctccatccaactttaacattaaaccatttaacaaaccttagcttgtctcttacttcccaactaatttctttatactttggtataacaactcttacatctgcatttttttgtgcaagtgcttttggtaatgccccagcaacatctccgagcccccctgttttaatgaacggactagcttcagatgctacaaataaaactctcattctttatccccctcaacctctagcaaataaatttatatcattatactatagatatttttataatatttactttctcaaacggtctttttaaccttttattcatctttttctttaatttcttgatctacattaatttcattcacttttaatattaatgttgccattggaggcacttttactttcaaagaatatggttgattgtggaattgagtcttttcagatacaagcatttcacccataatctgacctgaaccaccatatttactatcatcagaattaaatacttcttcatagctccccaaaaatggtactccaatttgataatcataatacacaatagaagtaaaattaattataaaaatcagtgtatctttatcatttctacttcttctagcaaaaattaatatgctttgttcattattatcggcttctatccaattaaagcctctatagtcatgatcgagctcccaaaaagctttattattaaggtatagattgtttaaatccttaaaaaataattgagtttttttatggattcctaaatcatcgattaggttccattttaattcctcatattctctccactcaattttctgagcaaattcgcaccccataaacgataactttttgcccggatgtcccatcatataacacataaacgctcggagacctgcaaacttattccattcatctccccacattttgtttaccaatgatttcttaccatgaacaacttcatcgtgtgaaagtggcaataaataattttcagcataattatacatcatcgcaaatgttatatttttatgattatgttttctatatttaggatctatttcgacatactctaatgtatcattcatccaacccatattccattttaagttgaatcccaaaccatcataaattgcaggttttgtgacattaggccaagatgttgattcctctgcaatcataagtgcagtcggatattctgcaaatactgctttatttaactcctttagaaaatctattgcttctaaattcccatttcctccatatttgtttggtatccattccccgggcgatctgctataatccaagtaaagtatgcttgatacagcatcaacccttaatccatcaatatggaactctttataccagtataatgcattcgatattaaataacttttaacttcatctctacctagatcaaaattacaagttccccaacccttattttccgctctccattcttcttgatattcgtatgttggtgttccatcaaacttatataatccgtgagcatccttacaaaaatgacctggaacccaatccattattactcctatattagcctcatgcaatttatttattaaaattttaataccttcataatccccatacctacttgttggtgaataataacctgtcccctgatatccccaagaagcatccaatggatgttcaataagcggcataagctctacatgtgtatatcccatatcttttacatacttaggtaaatcttctgcgatttcttcgtattttaagaatccgccatctttatttgtcttccatgagcccaaatgtatctcatatatatttaatggttgctcaagtacatttattttatttctttgatcaatccattttttatcattccatttgaaagctttaggcttatatactattgatgcattatctggtctcaattcactttgtattgcatacggatcggctttgtattctcccatctctccatcgcttcccactatacaatacttgtatctatttccggccttcgcagtataaaaaaagcctctccataatccattttcagttattctttcaagtttgtattcctcttttacttcgaaattattaaaatccccaactacatatacatcttttgcattaggtgcccacgttacaaattgcacacctttctttcttttctcagttttaatatgtgagcctaaaatattataagattcatagtttttaccttgatgaaacaaatatgtgttaagattagttatttcagatttatcaatactttctgttctctttttaacattaattttactatgttctgttttcgacttttcaatcttctccccttctgcttgaaattctcccattaattcttttgaagctgatttttttcttgcgcttgcttttgttgaagttactgcagatttcccttttgaagatttattagttgttctttttgtctttgattgtacatttaattcattcgttttggtggatttagatttattaatattatctccaccctccaattcagattctttattattctcttcttttaaaataattttttcttcgtttttattctccaacgcattcttcttatcaattgccttagatttctttaaactccctttagatttaataccaatttctttatcatttgtagtaatgtcttttaccttaatatctagattattaattggatttaattcagttgtttcctttgaggaaattttctttttcgctcttccctttgtcttacttattcttttctcaacagatgaattatcttcgatagatacttttccgtcttcttctgtcaaaccgttcatatctctaggacctatttcatctttatctttaatcttactgcttttaggatcattttgcattaaactatacccccatccatattcatatccctctcataaactaaattaaatgcttctctttattataattctcactatatatatatcttaccaaattttatggtacttttcacttatttttctttatttttaataaaaattataattaatttaacttttaatataataaatatatatttttatccatatataatgtataatattcaatcattcattttattaaatttaaaatcaattcacagaatagcaataatcaagcgcataaaagacgctgtgtattaggaaataaagtgagcagcacctaagttttattctgctaagtttttaatattggaaaaatgattttaaactcatgtcacttatatatctttttaaaatcatgatcacagggcgatcttcactatctaaccaatgataatagtgtttaatttaccaaaattcataccataaaaaaagagaatccatatcttgaatcctctctttaacaattagtattaaaacaactttaatatattaccttaaactttataattattcatatattttaaataatacaattcaagcatatgaatcaattaataccatagagcctacttattaaaagtgcgaaatattataaaataaaaaaagatagttattacaactatcttttttgcttacctcgcaacgtcctactctgccacacagtctcccatgcagtaccatcggcgctatagaccttaactttcctgttcggaatgggaaggagtgttacctctatgccatcatcacgagatcttcaatttgaaaaaactttgttctttcaaaattgcacacagtttctttaatgtatttacaacttgactatattggtcaagccctcgacctattagtatcagtcagctaaatatgttaccacacttacacctctgacctatcaaccttgtagtcttcaaggggtcttactagcttatgctatgggaaatctcatcttgaggtgggcttcacacttagatgctttcagcgtttatcccttcccgacttag

SEQ ID NO: 138 - DNA, 12295 bp, Clostridium beijerinckii
taaatattcagtattattttcaatattattagaacattcaaaataacaatttataagcttaaataaataccattttaatgtttttgaatagatttcttcattatttatatttttaatgaacttaactttttcatcgtaaacatctattatatctaacctttttttattaaacttacttgtagttatactgttaggagtgatcctatagtagtataaaggcctattagtataagtgatcttattagctttataatataatttatatgtagtgccttcatcttcatggattttgcctacaggataaaaaatatctttaaagagttctcgtttgtagagcttattccaagctactactgtttgagtatataagccattatagaagttatttaggctttccatattattgtaagaattaataatctcatcatctatatgaggtattgagtcatcgctattagctgttttaaaaaaatcgcaacatgaaatatcagaattattttcctttagcaattttaacaaaacttcatacatagttttatctaaccagtcatcgctgtctacgaaaccaatataatttcctctagctatatcaaggccagcatttctggcagaacttagaccattatttttcttatgtataacaattattctatcatcctttttagagaattcatcacatatctttccggaattatccaatgaaccatcatcaactaaaataatttcaagatttttttcagtttgatttaaaatgctatctatacattgaggtaaatatttctcaacattataaacaggcacaataacactaattaaatctttagtattttccataatatattctccaatcttttactcaggttaaaatttgctctatagatggttaagctgtaataaattataacatattaaggcataatttagaattaataatctgtagaaggtattgtaatagaaaattaaaagtcaatatttaatatgtattattgagttttatgactacattgatataataaaaggtagatatgtattaaaggagaaaaagatgaacaataatactaattattcaaattatgaagacttacagctaagagatgctcagttaataatggcaagcattttaaaagatgtaaaaaaaatttgtgacaagcataatattagatattttctagatgctggaacgcttataggagcggttagacataaaggatttataccatgggatgacgatattgacattggaatgcttagagaagattataataaatttttaagtgtagttaagaatgaactacctgatcatttatttttgcagactcatgaaaatgatcctaattatgatatctatcaagttccatgcaaaataagatataataatacactttttattgaagataagattgcagaaaatgaaaagatgcataatggtttatttatagatattataccttatgatagtcttcctaaaaaaagatgggtatacaatattcaaagaaaaataagcaattttgtattaagaagtttcataagaattagagaaaaacctgaaaagcttacattaaaaaataaaattacatattttatttataatattgtatcaagtatttttacaacaaaaagaagacagaaattatttgactttttagttaaatggaatgatagaaattcagaatatatgggatatggattggatacagtatggagtcagtacatatataaaaaagaggacttttttgatttgataaaagttgaattcgaaggagattattttaatgcgcctaagaattatgatgctgttttaacacaattgtatggcgattatatgacacttccgaaagaagaagacagagtatggcatgccagaataatcaaaaagttaaaaaatgcccaataggcatgttcgttttaattataaaagaatgtagatttatttatagtagtaaaactatttctctaaatgagagtatttttacttagctataatgaatgaaaatgaaaatttacttaagaaaatggcttaatattgcatatgggcatcaatactagtataattcaagtagtgttgaaaagtttaaagttatttgacggtacagtatttaaatataaaagtgattttatattttttaaatttatagataaatcaactataatctatacttatgcgtatacctcaccgaaatgaataatatacttttgctccagtttctggttggaatatatttcatgggctaagtatagtttgttattgggatatccacaattgatgtaaaaaatgataattttaacatatatattctttaaaacaaaagaatatatatgttcataatgtctattagcccaatattatagtaagttatggcattaaataggccagtatgctgacttattgttttctgaatataattaaataaaaggagcgaatagttttggtaaaagtatctatcattactcctgtttataatgtagaagaatgtattgaaagaagtattaaatctgttatgaatcaaacttgcaaagattttgaacttttacttatagatgatggatcaaaggataaaagtatcgatatagcaagaggattacttgaaaattcaagtataaattataaaatcataactcaaaaaaattcgggtgttagtgcggcaagaaacagaggaataaaagaagctagtggagagtatataacttttttagattcagatgattatattgatcataaatttgttgagcgtatgtatgaaaaagccgaagaaagtaaatgtgagatagttttttgtgattatagtgaggttgacgctaaaggaaatgtgctagttcaaaatagaactaactatttaaatgagttcattagcggaaaagaagctgctcttatgcagttaaaagatgatataacaataggaatgagaagtgctatatataaatcttccattatacaagataataatcttttatttgatactaaaagaaaatatggagaagatatggtctttgttgtaaaggcattgttatatgcaaaaaaagttataagcgtaaatgaagtattggctttttatgttatatggggaaattctgtgactcaaaatgtatcattgaagcatttggattgctattattcatatattgacctattaaatgatataaaagatgatgaaagcctaaataagataaaaagttttttagttgaatttaaaataccttattcaatatcacatgttttttcggtattaggtaaggattcaaatttccatgaggaactttttaagtttttaaataaagaggatgtaagaaaatatttaaagaattataaaatgcaaaagttggataagaataatattagatattctattcaatgtaagggaatgctgtcttgtcctaaattattaataaaagttttagataaagtaagataatagtttaaattaggacattttagtgagaatctctgaagtaggaggggaagtatagtgaagaattggaagacttttatagttatgataatcgatatgtttatggttaatatggcatatcttttctcaataaatataaccaatagtggagattttacattaattgcgaaaatatacactcatgattgtatagcgttaagtttaatttatttagtatgtttttacttgtttaaaatgtatgaaagtctatggcatttaactggtactgacgagtttttgttaggtgttggtggaaatattttagcaggaataatatcaatagggtatactagaattctaggtaatacaattccgttaaatgtttcggttgtcggaatacttttaagtattttctttgtattaggatatagaatattgtatagggtatatagaagaactcttttgtacataccatttaaatactcatcagaccaaagaagagtaatgatagtcggggctggctcggctggaactatgcttattaatgaaatgatggcaagaagagaactaaagtataatccgatagttcttatagatgatgataaaagtaagcttggaaaaagaatatcaggtgtaaaaatagaaggaaacagatacgatataccttatatagttggagatcaggaaatagatttaatattaattgcgattccatctcttgatgcgaaaaataaggcagaaataattgaaatttgtaagaatacaaattgtaaacttcaaataatacctggaatgtacgaaatactaagtggagacgctacagttagtagaataaaagatgttgatttagaagatttgcttggaagagatcctattcaacttgataataaagggatttcagattatatagaaggaaagactatattagtaactggagggggaggatcaataggttcggaactttgcagacaaatttctgtatataatcctaaaagacttataatatttgatatttatgaaaacaatgtatatgatatacaaaatgaacttagagaagagtttccagacatgaatcttactgtattaataggttcagttagggatagaaagagacttcatgaaatatttacaaaatatagagtgaatgtggtattccatgcagcagcacataagcatgtgcctttaatggaagatagtcctaaagaggctataaaaaacaatgtttttggaactttgaatttagcattagaagcaagtgaggctaacgtagaaagattcgttatgatttcaacagataaagctgttaacccaactaatattatgggagcaacaaaaagattatgtgaaatgatcattcaagccatggataagcagtctaggacagaatttgttgcggttagatttggaaatgtgcttggaagtaatggatcagtaataccattattcaaaagacaaattgctaatggtggccctgtaactgtaactcataaaaagattattagatactttatgctaattccagaagctgcgcagttagtgcttcaagccggtgcttttgcaagaggtggagaagtttttgtattagatatgggaaaaccagttaaaatttatgacttggcatgtgatttaataaggctttcagggcttgaacccaatagagatataaaaattgtagttacaggtcttagaccaggagaaaagctatacgaagaacttttaatgagtgaagaaggattagaaaatacggttcacaataaaatatatgtaggtaaaccaacatttgaagatatgaatagcttaacaattaagctggagcaattacaaaagttattggagcttagcgatatatcagagattaagcatcaaatgcaaaagatagttccaacatatcattataaaaacgaagatgaagtggctgcagaaaatgcagataaggagtaataatgacgagagaagatgtaattagaaatatatttttagctattatatttgctattagtggatttttaggaatagcaaatggaagttatatagtatctataatgtacatattgacagtagtaatattagtagtttttattcttaaagataaagatttatataatatgttctatacactacttttaatttctgcattttatgactatacattgtatgtaccaagagtgcaaagtgtatatttatttcatatagttttgggaatatttacacttatgtcattgtttagaatatttaaagacagacagattttaatggacttggatagaaaagtattagcaatatatgtactttggtttatatatatgtgtgttagtataatatggtcgttaaataaaagcttgtcaataaagtatatagctatctacttgatgatgtttgcgtttattgtaaacatgatggtatataacattaatagagaaagaattaaaaaaacaattactatattatcatcgctaattttacttataatattgattggttttatagaagttattcttggaagacagctaccagttaaacattatgctgatgcatttattgaatttctaccaaaaggtgaccaagatttaatacatgcaagacctatagcattttcatttaatcctaataacctagcggctactcttgcaatactgttaccaattggtttttatgcaatatataaatttgagaacatattttttaaagtagtttgcataattgcttcaattattgctttttcgttgatttcaataacaacatcaagaacaggttttgtggctgctgcatttggagttatagtttatctaatttattctgtaataaatataaaaaggataggattaaaggggatagtatgcccattaattttagtgatttctctttttgtggcctttaaatatagttatatgataatgaatatttcacaaacagaatctggtcaggagcagaagaaaaatggtcttgcagataagcttgatgctctaggggatcaagaaattcaagaaggcggagatggatctcttaatgttagatggacaatagtaagcgatgtattaagaggaacaataaaagagaaacattatctaggctatggagtaggaaatgttgaacaatatattaaaaatcaaggaaatacaggaaatatatatagcccgcactgttatccaatagaaattcttggagacttcggtttaccagggctagcgctttatggtatatactatttatacttgttaattcaaaatatgattattggaataaagaaaaagagtccaatgtgttttgcagctgtaacaggccttatagcttttgcaccagcgagttttggacctagttctataacatatgtattttcatattggatgcttatgggatttgcagtagcatgtatacaagtttacaaaaaggaaagtgatgagtatagaccaacatcgtcatcctcaatgaaggaatatagaataggataatagagagcacgagtgtttataagttaaaatataattcagatattaatatattatcaaataaaaaatggaaggaataccttccatttttttattattttttagttgttaaagtcttatatttcaaatgtttagaatatgttgatttatacttatcctaaatatttctcaataatttctgtgattattgaagaactgtctccacttccaaatgcagaagcaggagtaccagttggattgaagttttctatagcctccattatcttatcagaattacttccaactataacgttccaaccgttagttacagtttcaacccattcagtttcatctctcatagttatacatggtttctttaagaagtatgcttctttttgaactccgccactatctgtaactatcttttgagaattttcctgaagagaaatcatatctaaatatcccacgggatcaataattcttatattttctccaacatgcaaatcataagtttcaataaatttctttgttctaggatgtagtggaagtatgattctcttaccagagttatttaaagcagtaatgattgaagataatctttcaatactgttagtgttttcagcacgatgtattgttgaaagtatataactatttggtgctaaatcaagtttgtcaagtattgttgagatatctttagctctttctttaaagagatttattgcatcatacattacatcgccgacattatgaacaccttttgtaatattttcatcctttaagttatttaaagcagttaaagtaggtgtgaaaagtaaatcggatatatggtctgttaatattctattttgctcttcaggcatagccttattgaaacttctaagaccagcttcaacgtgcgctacaggaattaataatttgcttgcacataggctacctgcaagggttgaatttgtatcgccataaactaaaaccatgtctggcttttcttttaagtatatttcttcaagagatattaacatgctaccagtttgatgcccatgattagatgaaccaatgtttaaattataatctggttttggaattccaagctcctcaaagaatatgtcggacatattattatcataatgctgccctgtgtgtactaaaatttcactgtttccatttcttctaattttattagatactgtcgcggctttaatgaactgtggtcttgcacctataacagttaatactttcatataataggcctccttaaattttaggtatttatttgtgaattatttatatttacgtataaataaatatcaagtgaaatttatttgagataagaattatctcaatctgaatattagttaaacttataaaaaataatcaccacaatgtttaggtgtatgcgaatgatattacacttacgcagaattaaaaattgatttagtgtgattcttctaagcaaaccactcaaaagcgaatttctaaagtttatattttagaaacataagatttcgatttaaagtttttatgttctgtcctttgccatctccctgtgagtacttggattattgctatataatcactcagctgacttttgaaagaaggctctcacataaagagtaagtgctatagcggctagacatcagataacgttattttatcatataaaattcataaatgaaataatatgggtgatattataaagtaaaagcttatattcatattgttgaaatgaagtatttcatatgttattcttatactgattataactctggagggaaaaagatgaaaaactgtttagtacttttaactaaagtttttccttttgataaaggagaagaatttatagaaggcgaaataaaaatgctttctgaagcttttgaaaaagtaatagtgatagcaactagtgtagctgatgatgcgatacaaacaagaagtattcctagtaactttgaagtacataaaattaaggcttcaaaaataaagcatagtttacctattagtgctgtgaagctatttccattttataattataatggatgtgtagataaagaagaacgcaatgctattagtggctccataaaaaagaaagcttatttaacatattttacagcaaaagcaaacagtgttttaaaagaagttttggaaatcattaaaaaatataatatggatgagtatagcgggataactttatatagttattggttatatgatattgcttttgtggcaataaaacttaaagaactttatggtaaaaagattacaagagtagtaagtagaacacatagatatgatctttatgctaatgaaaactcgatgaattatataccacttagatattatttcctaagaaatttagacgcggtatatccatgttctgacgatggaagtaattatctaaaggagctttatccagattgctcagataaaattaaaactgcatatcttgggacaaaagattatggaacttcgcaaggatcaaaagacttaacatatagaattgtgagttgctgccatgtttcaccagtaaagcgtatagatttattggcaaagtcactggcaacattgaaagattcgggattaaatctaaaatggacacattttggagcaggagatgggttggatcaaattaaggagtatgcaagagaaaatcttgattttatggagacaaattttcctgggagtgttaaaaattccgagttaatggaatattataaaaatgaatcagtcgatttgttcataaacacaagtagttcagaaggattaccggttagtatcatggaagcatgttctttttcaattccaacaattgcgactaatgtaggcggtacggctgagattgttaaagagggtgaaactggattgttattggataaagatttcgatcctgaggagcttggaaataaaattaaatatatggcggaaatatcagaggaagaaaaacaaaaattccgtgatagatgccgtttactttggactgaaaatttttgtgcagatagtaatttcagaaaatttgcacatggaattagagcggttcaataaaatcaattaaaaagttctgatttattttttatcagaacttttttatatgattaattatagatcatttacgaaggagagtgtgccagaaagttttatttaagatgattcaagtgataattgaagaattatctcaatttccgaaaacagaagtatgagtttctgttagattaaatttttctgataaattcacaattttattggaatcacttccaactataaagttctaaacgttattcatagcttctatctattcagtatcatatcattatacatggcttctttttgactcagccaatatctgtgtaatctctctataataaaagcatatctatgtattctacaggtatcaacagtttacttacgcaaatgcttccagtaagagctgaattcgttataaagcagatttatcatagatacaataaggaatgactagccttataactggattggccattcttaatgtttatgattatgatataattggaattaaatgaagtaatactctaaaatgtaatagatagtatttgagttgaaatatataattattatttggaggcgtaatatgttaaaaaagaagatactagtagtagaagatgaattctcaattagcgatactttaaaatttgctctttcaaaggaaaattttgaagttaggggggcatacaatggggaaagtgcgttaaaaatttttgaagaatttgaacctcatttggttttgttagatataatgcttccagacataagtggttttgaattatgtaagatcatgagccaaaaaagttacatagttatgcttactgcaagggatgatgtaattgataaaatattgggaatggaaataggtgccgatgattacataacaaagccttttgaaataagagaagttacagcaagaattaatgctatttttagaagggtaagtaaaaatatttttaataatgaacatgagaatatatctagtactgtttcagaaaatgatttagatgatatcgatggatataagaataaaaaagatgagttcactattaattttgatacaagaacggtaattaaagatgggaaagagataatgctaaaaagaaaagaattcgatttgttgagctatttatataagaataaagggatcgtctttaatagacagcagcttttaaatgaggtttggggatatgattattacggggatactagaactgttgatgttcatatacgaaggttaagggcaaatcttggtgatgataaggaaaattcgatagtggaaacagtttttggtgtagggtatgtaataagataaaagcataaggttaggaagtggagaatatgctgaaaacactaaaaggaaaaataatgataggaattgtatttgctcttattatatttaattttgggttaagtattttcatatataatacttattatgcaaatataaagaataatattaaagatgatatggagaatattagaaagttcagcacaagcactttaaaatatagtgctatggttattgaagatgatcttaaagtaaaaaataaaactgtgtatgaagttaataacaattatgattgctatgtgggactgtatgattataataataacccaatagattataaaggtaatatcttatttgaaaatagtattaataatgtattagaaaattcaaaaggaaaaagctcggtaataatatttaatgttaaaaatggattggtttgtacatatgtttaccctatatatcttaatggaaaatatgattcaagtttagttatacaaaaaagctataatgattattatgatagtattaaaaatataatgaccaatattataggagctcaaattgttcttttaatagtaataataggagcattaaattattttataaataaaataataagcccgttaaaaaagcttagtgtacaaatgaaaaaatatggagaaggaaaagaagttgatagaatttcagtaaaatctaaggatgaaattggacaagttactaagtcttttaacgaaatgattgaagaaaagaaaaaattagaaaatatatcgaaagaattttttaataatgcaacgcatgagcttaagactccagttacttcaatatacggatatgttcaaatattaaaagaagaagatttaaatagtatagatgaagaattcaaaaaaagagctgttaatagaataatgatggaatgtggaaaattaaaagaacttatacaaaagcttcttgaaatttcacgatgtggtgttaaaaaaaaggatgtaaagcaagaggttaaacttaacatattaattgcagaaatatgtgatagattaattgataggtgtagacgattaaataaagagtttattattaatatagatgaaattgctgtattaactgtaaaagaagatattgagcatataattttaaatttaattgataatgcattgaaatattcaaaaggcaaagaaatatatatt

SEQ ID NO: 139 - DNA, 12264 bp, Clostridium beijerinckii
ttataaagtaataaataagaaatatcaatttgaatatctataataaaagtctaaaattttgtaataaaataataaaatggggataatatattaatatgtatatattaaacaaatttatccaagaataaacaattatgagataaatgagttataatataattagaaaacaaaagataactattaataatatattttataaaatattagttgggaaggtgagtaaagtgtgggaagtttataattcatttaattattgggaaaacgttatcagcaagaataagacaataagaggacatatgtttatgcagaaaccaccaacagaaagaagtatttattttcatacccttatattcggaaacaataatggtataaacaatatatgggggtatttccctaatagaaagtgtttgattgggtatcttcagtattcgttcttgcaggaagctttttataagtggatatatggaaaagaaaaattaattactagaattccacatttaactgttgataagatcattcgtgatggagaaaaactaaagaaaatagacaaagaagttgcaagtaatatgaggagagactatgatttcttaagtagtttatggcatcttccatctgaaaaggctcaagctaggttagataaattcccagtagagtttaacaagaagtggatgggggataacacagaatttttatatataaaaattttcaagactccagaggagcttggagaatttgtaatttcctcttcgttattaacaaatacaaaggaagaattagaaaatagaataggaatgtctattaatgagtgggaagatatctgcaaaaatgcaataagtgatcctaataaaggggaagtattcagagagattctactaaagaaattaagtgaagtattttagcagattaataaataatctaaggagctataattagcagagttcaatctgctaattatagctcctttttaattataaatccctataaactttgaatagatagtgcatttctaaaagtttatactttcaacagaagatatgctttgagaagaaattccaagcatctcaccagtaaagccaaggccttcttcagtagtagccttaatatttattttattaatatctatattcagagcaattgaaatgttctttctcatattctcaatatgaggcagcatttttggtttttgagctattattgtagcgtctatgttgtttatggcatagccggacttaagaagcaatttacctgtttcttcaagaagtatgatactagatatgccactaaatctattgtctgtatcagggaaatgttttcctatatccccaagagcacaagcgcccaataaagagtctattatagcgtggataagaacatccgcatcggaatgacctagtagccccttctcatatggaatttctactccccctaaaattaattttctattttcaactaatctatgaacatcatatcctaatccaattctcatataatcacctcattatgtgttttattattttattattttaacatattatgaggctttttatataaataattatactaatttaaaatacgtctacgcttatttgtggacatgttatttaaagaacttgtcttggttttaatataaaatttaatgttaaaccaagaaataaatctatttatatgaaaatgtataaaggttattctacgtctttttacaaaatctacatatataatttttcctctcattaataatctccaaaatattgcttttaaattaaatttagataaagaaaattttatagataaacagctttatatgctataatatcatagtatgaagaacttatacaaagggttaatattttaaagaggtgttaattttatggagaatttgggctttagtaaagacaaatatgtattttcatccatgccgtcaatgttcttaataggagatactgcggaggatattagaaaaaaacagatatctttatttataaatgaattaagctcatataatgttttacttaaagatttagtaaactttccgattaaagaagctgacagaaatatagctttaaatatagcttattatatagctagtgatgaggatttactaagaataatcaatgaaaaaagagctttacctatagctaaaataagtaagttaactaggataaaatctgagattataaataaacttagggactacataatagcttattgcattataataactaattcaaattataaatttattcaagattatctaagaataaaattaaaagaagataatcaagttgcaagcatttcaagtaaaaatcaacaactatataaagggatagtaataaaagcttttaaaagttcagcatatatattaacttcaaaaggagaatttttaaagataaagacttctaatagatcaaaggttggagatgtatgtgaaggaaaagaaaagaaagggattagggggtacaaaatacatatatcaatattactatttattttaatattgattggtagtggtataactattgaatataggacaacacaaagcataatagttatagaaacaacttctaatataaagattcatattaataagtttcacaaagttatatatgcctattcgcctacagataaaggaaaagaacttataggaaatattgatgttttgaacaaggatgttgatgatgctatatcggagatatttgaatacgcattggataatgaaatgttagatttaagtaggaaaacattaataacaattaatggacaagctttaaaatatggagagcttactaaaacaaataaatttatatacgaacataatatacctatagctataaataatgcaggaaatcaacaaaaactacctaaatactcaactgaagatagcaaggaagaaaaaaaataactctttatttaagagttattttttagtttgtgctaaaacttccttaaaagtattcatatcatattttgagctaatataaattctatcaagtttaagaatattatcatctctatctgagagtcctctcttagtagtaaatgctaacgtataacctgaatttttagctgcggtaacactatcatcattaaaatctccgaatggataggcaatagcttcaattttttttcctgttattgattccaaagtttcttttgattccttcaattcatttaattgcttatcatatggaagttgattaagtttgggatggctaacagtatggctttctatatctattccgtaatcagacatttcttttatagcctcttttgataaataataggaaccatctagatctgatgttatacaaaatattgttgctaccatatttagatttttcaaaattggaaaagcattgtagtaattatccatatagccatcatcaaaagtaataactatgctcttctcaggaattggagaattgtttaataagtagttttttagttcatctaaagttaatgttatataaccctgattttttatgtactcaagctgcatccgaagattttctggagttattgtaacctcattttcagctgtttctctcacggaatggtaatataatacgggaactcctctattgtcagtaattaagtttgagccattaaaggatctttcgttttgaattgtgttttgttctatgttggaaggatccttttctaatccatttttagattcaacatgattttcatcaatacttgtattatcagaactatgattagaagctatagaatttttataagatatattatgtagtattaggtaaatagaaaacattacaaacaataagctaaatatcaaaatacttaaggaagttttatttttgaaaaatcttttgtaagaaatgtttcttggtggtaaagttccttttaacatgttgttattattcacctccttgtaattaaaacaaatataattttcttttataattataccctaaacttaaagaaaaactacaagacctaatataagtcatttgtgatatatattctaattaaaattctaaatctcagccttaattgagtccttagattaccaggggtttaaatgtaaatttattagtgcaagatattatataaaaaatttatttttatatagtttgagcggaataacttattgaaaaaagtagcataatataaaaatagtacaacttactaacattatccacattcgcttgtggataaaatgttataaagctgttaacatacataattttacatgttggttttgtggatataaaatatattatgtcgcaaaatgcataaatcagggaggcgctaaaatgggtattatagctaatataacagggctattaatagtaagttcaatgttatccactgcttgtccacaggaaatgtttataactaataaaatgcaaagtgaaagcaaaattaaaattgtggataaatctataactaaaaatctaaattacttaaaattagacataaatatgcctcaattagtaggtgaaaatgatgaaaaaagaataaatttgataaataatgtaattaatcaagatattttgccaagagctgaggagtctgaaaaaacagcgaaagaatacttcggagaaaagggacaagaaaccccaagatttccatatgaaatttattcaagatatacaacctcagaagataataatcaaattcttagcctatataatgactattatgagtttcttggtggagctcatggtatgacaacaaggacttcatatacaatagataagaagaaagaagcgctgctaactttaaaggaattattcagtgaaggatataattattctgacataataaataaagaaatagaaaatcaaataaaagagaatccagaaaattattttgattcaggtaatgtatttaagggcattagtgaaaatcaaagtttttatataagagacgataacctagtaatatactaccagctgtatgatatagcgccatatgtatttggaatccctgaatttaaaattcctctaaaactatttgataaggattttgtttattataaaaattgggattcgggaagtaagaagtagataataattttaattagataggtcattaaatcgaaagctgattgacatcttaagattaactttaacttatggacttaaaatagatagtaataaattatagaacaaatttaaataaaagacatatatatagaaattaaatcatagcaattcataaaaatataccatataggattatattatctatcctgtatggtatattttacttaatactatgatttaacttattattactaatattttttaattattataggcactagtgttttgatttcctctaaatccataaccatctgaaattattctgcctattccagttaccttaccagttatgcatcctctgcagtgtgcaggtgtatcgcctgtacatattttacctggatataatgcataaagctttctatattcaccttcagtaacgttaggcattacaacattagcaccgctttgaagtgcaactattcttccgtttggagttaaagattccattgcagttgttgcaggaatatttatatcaggaagtattaatctagttaaagccatgacctttaatgctaaagtaagatttccaccttgagcatcctttaaaggtgtatcttcatttggtataaatggacctataccaatcatatctgcattaatttctttaaagaaaagtatatcactagcgatagattctaatgtttgatttggtagaccaacaagaatgccacttccaacttcatatcctaagtctcttaaattctttaaacaattcaatctttcctcgaaactcatgttaggatccatatcttcataaagtttcttatcagtagtttcaattcttattaaatatctatcagctccagcttctttaaatgctttatattcctcataagttttttcacctaagcttaaggttaaagcgacgtttaatttctttatctcttttactatgtttgtcattctttctttagtaaaataatcatcttctccaccttgaagcacaagtgttttatagccataactaacagcctttttagcaaagtctagaatttcttcttcagttaatctatatctttcaagatttttattgtctctgcgtaaaccacaataaaggcaatttcttttgcaaatatttgtgaattctatgagccctcttaaatgaacataatctcctaagtatttttgacgtacttcatcagcagctttaaatagttcttcatttatatcatcgttttgtagtaattcaagtatttcatctttatttaagtcatgtgtaattttagctttttcaataattttattcatagttcctcctaagttaaaagaaattaatagctaactgatattagtatactatagaatctaacaacataacaacatagtagtttgtgtaaaatatgacattcaccataacggactattattagggcaatgttttttttaggaatcgattaatctgcagaagatagtttttataggactcataataataggagtcataggattaaatttaatatctacaatacattaatatcaatataaaagaagctttgttagagacatgtagaataggaaaaagaataatctattctatcatgtctattgttttacgatttttagaaaataacagcatgatatgtactttgttctcattgcaaatgaatatataatttatatttttattagataccttagcaattattttgatatgggataaattaaatattattttcaggataaactatacacagtttgtttatagtaagtacaactactatacaaaagtaacttgagtataaaaatttagaagataattttggaggtagaaaatgagagttacaaatccagaagaattgacaaaaagaatggagcaaataagagaagctcaaagagaatttgcaaagttttcccaagaagatgtagatgaaatatttaggcaggcagccatggcagcgaatgatgcgagaattactcttgctaaaatggcagtagaagagagcggcatgggaatagtagaggataaggtaataaagaatcactttgcagctgagtacatatataaccaatacaaagatacaaagacttgcggagttatagagagagatgaaatgtttggaataactcatattgctgaacctataggggtaatagctgcaattgtgccaacaacaaacccaacatcaacagcaatatttaaaacattaattgcattaaagacaaggaacggaataattataagtccacatcctagggcaaagaattcaacaatagcagccgcaaaaatagttctagaagcagcagaaagagctggtgcaccaaaaggaataattggatggatagatgagccatcaatagaattatccagaaacgttatggcagaatctgatattatactagctacaggtggtcctggaatggttagagctgcgtattcatcaggaaaaccagctattggagttggagcaggaaatactccagctataattgatgatacagctcatataaaaatggttgtaaactcgattttgctttctaagacttttgataacggggtagtttgtgcatcagaacagagcataatagctatggaatcagtatatgatgaggttctaaaggaattagatgaaagaggagcttatatacttagaggtgaagaaattgataaggtcagaagtataatattagattcaaagggatctttaaattcagagattgttggtcagtcagcttacaagattgcaaaaatggctggagtagagatatcagaagctgctaaagtattaataggtgaagttgaatcacctgaattagaagaaccattttcacatgaaaaattgtcaccaatattaggtatgtataaagctaaaacttttgatgatgcgctaagattagcttccagaatgatagaattaggcggatttggtcatacatcaatactttatacaaatcaaatggaatcagtagacagaatagagaagttcggagtagccatgaagaccgctagaactttaataaatatgcctgcacctcagggtgcaatcggggatatatataactttaagttagcaccatcattgactcttggctgtggatcttgggggggaaattcaatatcggaaaatgtaggccctaagcatttaattaatgttaaaagaattgctgagaggagagaaaatattctttggttcagagttccagacaaaatctactttaaatttggatgtcttccaattgctttagaagaattaaacgcaatgaagaagaaaagggcattcatagtaacagatagagtattatttgatttgggttatacgcataagattacagatattttaagtgaaaatcatatagaatacaagatattttcagatgtagaacctgatccaacattaaaggctgcaaatttaggtgcagatgcaatgagagactttaatccagatgttattatagctataggtggaggatcgcctatggatgcagctaaaattatgtgggtaatgtatgagcatccagatgttagatttgaagacttagcaatgagatttatggatattagaaagagagtatatgagttccctccaatgggagaaaaggcaattttagttgcaattccaacatcagcaggaactggatcagaagtaactccatttgcagttataacagatcaacaaacaggagttaagtatccacttgcagattatgcattgactcctaatatggctataatagatgcagaacttatgatgagcatgcctaaaggattaacagcagcctctggtatagatgctttagttcatgcaattgaggcgtatgtttcagtgttagcatctgagtatacaaatggattagctttagaagcaataagattaacatttaaatatttaccagatgcatataatggaggaactacaaatattaaagctagagaaaagatggcccatgcgtcttctgtagcagggatggcttttgccaatgcatttttaggaatatgccactcaatggctcataagttaggagcattccaccatgtacctcatggaattgcaaatgcattattaatagatgaagcgattaggtttaatgcaacagatgcgcctagaaagcaagcggctttcccacaatataaatacccaaatgcaggatggagatatgctagaatagctgattatttaaatctaggaggaaatacagaagaagaaaaggttgaattattaattaaagcaatagatgatttaaaggccaaagttggaataccaaagagcataaaggaatttggagtttcagaagaaaagttctatgcttcaatggatgaaatggttgaacaggcgtttgatgatcaatgcacaggtgcaaatccaagatatcctttaatgagtgaaattaaagagatgtacataaaatcatatgattaatataatcactaaaaaagatactatggattaagtaacttatatatgtatattagtgtatcctaaatttctatgataattatgttagttaaataatataagtataatgtatatagaaactgggtccctacatttcttttaattgagagtttgatctatcaggatttctaaggtaagtttattcatttagtatataaaagtatatatttaagtaactgcaatgttgattataatatacaattcacattgcagtttacttattatgataaataaaccataatgaatttctataaaagctataagaattaacatataaattacatgaaacctaatcttcaatatacaacgatgcgaatgatttatatatttaacgataaaatactatataataacttggaaatgaataatttgtacaatatttaaaaatattgtaagattattatacggaatgaaagccaagtaaagaaaagtaatacatttttaaaagacgtaaggattagggagagtgctacatttgtattcagttattttagtcgaagatgattccacgcagagaggaattttaaaaacaatgattaattccatagatgagtctataaagatttatgaagctgatagtgaaagcgtcgctttagaaataattaaaaatagtgatattaacatgtttttcatagatattggtttaaaagaatcttcaggattagatcttgcaatggatattagaggaattcctaaatatgaatttagagagattgtttttttaacaacgcatgtggagtacatgttgcaagcatttaagcagactcattgctatgattatatattaaaaccttatagcaaagatgatgtacaaagtatgctgaataagcttattggtaaagatattaataatttaagcaatgaaattggtgatttaagtagggaacttgttataagaataagaacaggggtattcataagagtaaagatacatgatatcttatttatagaagttaagggaagagactgtgaagtaaatactattagccaagtttatacatattcaaacataagcttaaaaaaaatattagggttaattgattgtgaacatatagttcaaagtcataaatcttttgccgtaaataaaaattacatatttaaagtagaaaggttagactccagattaagtacgatatactttagtaagcattctaaaacagcattgttagggtataaatttaagaataatataatatcagagtttaagcaagtaggtagatattatgttaagtaattttattgtaaatagtttagatgctatgaatataatttatttatgggtggtattaaataaaaggaatagtagctggcataggtttttatttacggtaattatttgttcaagctcagtcacgactgtagaatactttaaattgaactttgttatttcatatatattaatgactataacaattaaaattatatataaaagagaattaaaagatattgtattgcagttttttttggtattatttacagaaatgagttttcaattggtgatttctacaattgtatatagaattatttatggtgagtttattaaaggaattatcttggagttaataacacttgtgagtatagctattttttcaaaactaaattctaacaataagattaattttgagaaaataaataatgatatttccatgtacctgattttaacatttagtatagatgttataatttttaaaattattttgatttatgatgatacactaatctcaaacaatttaccaattacagctttgatagttagtatattagttagttctcaaatactaatatataattatataattagggggatgaaagaaaatgaaaaattgaaaatatcaagggaatataatgaagtaattaatgaaattgttcaagagataaagcaacgacaacacgattttgttaattataagaatacaatacgaggaatcgttgaaattgtagatgaggataagataggacaggcgattaggaattatattaaagatgaagatatatatgatgataagataaatgaacttgtatatattgataatgtaattattaggtctatagtatatagaaatatgtgtaaggctaagaagaataatatcaattttcaatatgaaattgaaaacaatgttttagataatattttaagttataatgaaatatcaaatttattaaataatttgttgaataatgcttttgaggaagtaatgaaagatgactgcatcaaaaagaatattgaaattaagatcctaaaagaaggggaaacacattatctaatagttaaaaataatctttcaaacgcgaataatgttaatataaatgatatgcttaccagaggttattccactaaaaatacaggcacacgaggttatggactttataatgtagaacaaataattacgtcacataaagggtgcctggaagttaaagtggaatcaaaagaaattattttaaatatttattttaataattcttcaggataatctggttcacctatgtagcctgcacagcttgtgtttgatactaaattaaagaatttaattagtaaggctgaaaaaatgtttagtgatttttgcattataaacacctcctttaagattaattattatcacttgaataacttctaacaataaacttagaaagatacaattacatacttgtgtgtctctaagtttaaaaaataatatgcaccagaaagtaagagatattaaagaaagtatttttaatatctttttattttttacgggtcttttttcattacgacaaggagcataaactgaagttataatgaatgatattataaaaaatat

SEQ ID NO: 140 - DNA, 12108 bp, Clostridium beijerinckii
catcgctcgacttgcatgtgttaagcacgccgccagcgttcgtcctgagccaggatcaaactctcaataaaaagtttaatcttagcttactcaaataaaaattgctggtttacttaaatgtatttatcttattctgttcaattttcaaagaccaattttctctttcttacaactactgttgtaatcttttgttgttatctgtcgtttctgacagcttactcagtatatcaccgctttcaaagcttgtcaataactttttaaaaaaactttttaaactcatttttcagtagttctattagctttaagttattaattttgcatctcttagcgaggattttatcatatcatcaccattcgacattgtcaataactttcgtagaaaatttttaatttcttctttattaaaatcttttcagtcttaagttgttttgtttatgtctcttagcgacgtgttttatcttaacacatagccccttagccattccatcaaaaatcattgtttatataatctaaactttaaaacctccactaacctccatcttccttctactttctactattgatacactaggcatagttaactatttcttacttagtaaataggtatatggtcttacatttaacaccacattatataactatgtataattttatgctacataaatttacttatgcttttattagattttcttctcccaacctcaataaattagtttaattaatgtaaatagaaactgccaaacagtatacatagaaattattttctaaagtatactgtttagcaatttcctatcagccttaatattttatttatatttaatattatttcatccatttactctttagaaaataatttagaaatgtcaaatcatttgttaattctggatgaaaggatgtaactataatattatcctgtctagcagccactatcttgtcgtctaccttacataatattcttacattatcttttacctctgttatgtgtggagctctaataaagacaagttccatctcatcctttgatattttttctattactttatgagtcttaaaactatctatttgagttccaaatgcatttcttttcacttttatatccataagttgaagatatttttcttcttgaccctctacttcatttgctagtagtatcatacctgcacatgttccccatgtagggagtccactttctattttttcttttaatgattttattaatcctgttatcttaagaagtttgccaatagtagtactttctccacctggaagtattatggcatcaatatcatctaaatctttttcctttttcacttcaacaccagtatgtcctaatgcctttatttgatttaaatgttcaataaccccaccttgaaatgataaaaccccaaccttcattttaccatcctctttcagcatactttgtagccacttcagttgaatttataccactcatagcaccacctaaatcttctgaaacttctgctaatttttcaggattattataatatgtggttgcaagaactattgctctagctcttttttctggattatcagatttaaatatacccgatcctacaaatacaccttcactgcctaattgcatcataagtgcagcatctgctggtgttgcaattccacctgctgcaaaattaactactggaagcttcccattttcccacacatatttaactaattcatatggtgctccataattttttgctatagtcataagttcttcttttgatgctttttgtatctctttaatttgatcattcattgttctcatatgggtaacagcatttactacatctccagttcctgcttctcccttggttcttatcatcgatgcgccttcacctattcttcttaatgcctcaccaatattagttgcaccacatacaaatgggacactaaaatcttctttatttatatgatatttatcatctgctggtgtaagcacttcactttcatctataaagtcaatatttaatgcttccaaaatttgtgcttctacaaaatgtcctattctaactttggccattacaggaattgagaccgcctcttgtatttcccttatcattttaggatccgacattctagctactccaccttcctttcttatgtcggaaggaactctttcaagcgccattaccgcacatgccccagctttctctgctattatagcttcatctttattagttacatccataataactccaccttttaacatttgagcaagatttctatttattgtccctctttccataatacataaatcccccttttttctaagttactcatataataaaatatgtatggatacaaacgcaaatgtatccatacaataattcttaacttaattagctaatttaaaatataagaatatagtattatgatgaaacaataatccggaatttgttaataaataagaattaatggctaaaatacatagactaggcttctaaaaataccttcaaaataagaatattttcacaaatcaatctaaaattttcttcatattaaatttataactttctactcacaaatatttatatatctcttaaacttacctttgcatacatatgatttatcgactattttaaaacccgcatcaataatacaatcatccatctcttcaaatgtaactatgactaatctagtacttattctgcgtgcacttctaattagagatgtttgttcttctatggtagttggagtaaacagtccatatggtaaatctatgatagcagtatcatatttctcttcaatctcattcatatctccgttagtcactacattctcatatccgtaaaactccaagttcttcttggcattttctgcgatacttttattaatctcacatcctacaacatcaattcccattgaaagcgcttcaagaataactgttcctactccacaacatgggtctattaatttgcattctaaattgtttttaactgctatattaactagtgctctagctaccctaacgcttaaagaatttgaatatgaatacggcttattatcatgaatatgccacttataatcgtttttctcgtacattccaaatatccattttccacaaattcgtgtaactccaaggataactttaggattgtgaatttcaggctctcctgttattacaaatcctatctggctaagacttctaagacgttcttcataatctatatcactatattctgttcttaagtagcagaccttaaactcgttataagctagcttatcttttatgatgttgtctattatttgttctaaagaatcttcttcatatactactgaaatcatttcttttataaacggactccttgatgcactaatataaaaatctgaaaacaaatacttctcacttggtgttttaccaaaaagacatttcatctctaacttacataaatcttcttcaaatacaggatacttaatatagtaaaaatactttttataattattgcaatttaattttattatttttttattcaaccaattcaccatcttcactttaaatataatctaagtattaatattattcttttcaacaataactgtctatatatatcaataaatcaaccttcttacttatttaatattatttataaatcacaatcttagtctgctattattcaaaaattagaatcatccttaaatcgagaacatttttgaaaacactcacactttttaaacctataactttactcaacataacattatttttgattaatttataaatcatgataacgtttttataattattttattattttttatataaaatattaaatatcaatcttgtaataattactcctatatgttattatatcaacaatatatacgatagctttatagcattttatcaaagtattataaaattaattattattttaatattattttttaaagttaaaagggggataaatatatgaaaaaaagtttactatcaggaatcttagcctctgctatggctattactcttcttgctggttgtagcgggaattcagctggaggtggaaataacggagataccatcaaaatcggtgctattggaccattatctggtgctgcatctacttatggagtttcagtaaaagaaggtgctcaattattagaaaaagaagttaacgatgcaggcggaatcaatggaaaaaaaattaaatttgtttttgaagatgatcaagctgatccaaactcatcaatgcaagctttcaataaacttgttgatgatgaaaaggtaagcgcaattttaggacctgttacatcaggtgcaacacttgcagtagcaccaaatgctacatcaaaacaaattccaatgattactccaacagctacagaaccaacaataactaaagttggtggagattatatgtttagaggctgttttgtagattcattccaaggagaggttcttgcaaaatatgctagtgaaaaattaggaaagaaaacagctgcagttttatataactctggatcagattattcaaaaggaatagccgatagctttaaatcaaaatttgaaagtgctggtggacaagttggtgaattcttaacttataatgataaagatactgactttaaggctcaattaacaaaaattaagagcttaaatccagatataatcgtattacctgattactataatgttgttggtcttattgctaaacaagctagagatatgggaataacttctcaattccttggtggagacggatgggagtcagaagaattagctaaaattggtggaaaagctgtagatggtgcattatatatcaatcactactactctggagactcagatgaaaatgtaaagaaatttgttgaatcatataaaaaggaatataacaaagaaccagattctttcgctgctctttcatatgacacatctaaaatattagttaaagcaatagaaaaggccggaaagacagacggtgctgctattaaagatgctttggcttcaatggaaatgaacagtgttactggaaacatcaaatttggtagtgatagaagcgctataaagagtgctgctattattaaagttgatggagataaaaaagttttagctgataaagttaatccttaatcattaaaaaagggaggaatatacaatggaatttttacaacaaatcattaacggtttagcgttaggtagcgtatatgccctcctagcattaggatatacaatggtatatggaataatacagttaataaattttgctcatggtgagatttatatgataggagccttttcaggcttctattgtgcttcaacattaaaattgccattaattccaacattattagttgctatggcagtttcagcattatctggaataattatagagaaaattgcttataagcctttaagaaattctccaagaattgctttgcttattacagctattggtgtttctttattcctacagaatgctatgagattattagttggatctaatccaaaaccatttccggatttaattaatgctgggagtattaatataggaactattcaaattgatataaagacaatattaatgtttggagtttctgcttttctagttgttttactacaatttattgtttataaaactaaagttggaaaagccatgagagcctcttctcaagatatggaagcagcttctcttatgggtataaatgttaataatactatttctcttacttttgcaataggttcagccttagctggtatagctggagttttagttgcgatatcttaccctagtatcactccttatatgggagctatgcctggacttaaagcttttgttgctgcagtacttggtggaattggaagtatacctggagcccttgttggtggaattgctataggattacttgaaacttttgctaaagcttatatttcaactaacttctcagatgcaatagtatttgcaattttaattataatacttttaattaagccttctggtctattaggtaaaaagaccaatgtgaaagtgtaggtgttaattatgaagaatttatttaataaaaaaaatatttgtataattgttggagttttaataacatatggagttctatttggcttaataagtgcaaatgttattaattcatattacaaaggaattattactttcgctttaataaatgttattttagccgtatccctaaatttaattgttggatttactggtcaattatgtttaggacatgctggatttatgtccataggtgcatatgtatcagctataataacacaaaaagcgcatatgccgtttgttgcttcaatacttattggtgctgtggttgcatgtatattagcggcattagttggatatcctacactgaagcttacaggtgactattttgcaataacaaccttagccttttgccaaattatccaaatagtaattatgaatattgatacagttggtggcgcacgtggacttaccggcatcccaacaaaaacaacttttacagttgctttcatattcatgatagctagtatagtcataataaaaaatataattaactcgtcccagggtagagcaatgctttctattcgtgaaaatgaaatagccgctgaatctatgggaatcaatgcattaaaatacaaaatgatggcatttgttatagctgccttttttgcagggcttgctggtggactttatgctcactattctggatatataaaaccagatcttttcgattttaacaaatcaattgactatctaacttttgttgtatttggtggtatgggatctttgtctggatcaattatttcagctataatgctgactttcttaccagagcttttgagaagtatgggcgatttcagaatggttatatatccattagctttaatactacttatgatattcagacctgaaggattattcggagataaagaaatttctcttaaaatctttggtaaattaataccaaggaaaaaatcagatgatagagaggaggcttaattcaatgctagaagttcaaaatttatcaattgtattcggtggattaaaggcagtgtcagattttaatctaacaataaatgaaaaagaaattgtcgggcttattggacctaatggcgctggtaagactactgtatttaacatgttaactggtgtttatactccaactgaaggtactatatcttatcttggagaaaagattcaaggtcttaaaccctataatattacacaaaagaaaatagccagaacttttcaaaatatacgtctattttctcatctttctgttcttgataatgttaaagtaagttttaactatagaataaattattctatatttgattccatctttagaactcctaaatttaggaaaacagaagctgaaattatagataaaagtattgaactattaaaagtcttttctctcgatggaaaaaaagatgagttagctagcaatctcccttatggcgaacaaagaaaacttgagatagtaagagccttagctgcaaagccatctcttctattattagatgaacctgctgctggtatgaatcctcaggaaactgtagaacttaccaagcttatagattggattaaagataagtttaatatatcaattcttttaattgagcatgatatgaaacttgttatgggaatctgtgataaaatagcagtccttgattacggaaaaaagattgctgaaggcactccagaagaaataaaaaataatcctaaggtaattgaagcttatctaggagagggggcttaaaaatgctaaaggtagaaaatattaatctatattatggtgtaattcatgcactaagggacatttcccttgaagtaaaacagggtgaaatagtgacattaataggcgccaacggtgctggcaaaacttctactcttagagctatatcaggccttgaaccaataaaatctggtacggtcacttttaagggctctgaattaaataaggttgcagctaataaaatagtttctctaggtctttcccatgtaccagaaggaagaagagtttttcctcagctatcggtcttagaaaatctagaactaggtgcttatttaagaaacgataaagcagaaattaaaaaagacatggaaatggtatttgctaagtttccaagacttaaggaaagaataaaacaacaagctggtactctttctggtggtgaacagcaaatgcttgcaattggaagggctcttatgaacagacctgaaatgcttatattagatgagccttcaatggggcttgcacctcttgtggttaaagatatttttgatacaattgttgaaattaataaatcaggaacaactatacttttagttgagcaaaatgcaaatatggcccttgccattgcacatagagcttatgttcttgaaaccggtaatatagtaaaatcaggtaatgcccaagttcttcttaatgatgaaagtattaagagtgcatatcttggtgaataactattcaaattaagttactattaaaaaaaagactgatgatcgaatcagtctttttcttataagcataaacaaaaattccagcaccaattataatccacaatagaattactaatatattatacgcaaaatttatatttaaaggttcattagtaaaaattctgcctggtaatacttgcatgttatagttaggtaaaaatttagctgccattccggctatattattcatttttgctaaagtacccgctaaaaatataaccatgaaaaacggcattcctatgatttctgcactagcctgattttctgctaaaattcctattacccatccaggttatataaaccatataactactaatgttgttataataataaaatgtcctgtgtaaggaatcttcattcccataatgaagtatgttagcatattaactacttatctgcaatctctagcaatgagaactttaacattatttctgtgtaatatctcatatattcttctactgtaaatctttcataaaaaccttcatctctaaatataacaccaatatttcctttgtttttatgaatataatcgctatgttttatttgatctatatatttcaccactaccaattacttctttatctaatataagatctattaatgtattactaaactctctatctgcttcactgcttaccaatcttccattttcaaccataagatttatatcgtttatgaaactattagtttgctttttatataaatttttttattttcaacattataaattattcttcttgacttatacattcagttaattaatatacattctagtcaaatcattacactagtttgtaatgatagcaatagtaggcttcaacattccataaataccataatgtaaaattcaattgaatttcatattatattaaattttataaacgacgaatagataattttattaatgataaactaaatttgtataaatgaaataaaaggaggttataatttatgagctacgaagaaaaagaatctctaaaaaatgaggcaaaaaaaatgatgattgatggagaacactggagtgcaattagagaaaaaactcatctaagactaaaagatttacgaagaattcaaagggatgaaataaatcctaagttctaaacttaaaattcattacacttaacaatgatagatagtactataaattaaaatactatgattttattactaactactaagcaaggtaatatatattttagaggtttctccaaactttctataaatatatatttactttgcttattttattatgcttaagcataatatatattatagaaaaagttgaaaatttttgaattttctgaatattttgttgtataatatatatgtataacaaatttatataaaaaataaaggggatgttttaaatggtaccatattttatgcttatttatagtgttataattatttcacttatagcaatcatttatttggtcaggtatacattttctcaagacaaaggcactagccaaatgcaagaaatatcaacttacattaaggaaggtgctatggcattcattaaaagacaatataaaaccatctttgttttatccattgttgctttatttttaatcatactttctaactatttcggcaatgcatcaaaaggtccaagctctgccatatctatatctttacatacaggtatagcttttataacaggcgcattctgctcagctttatctggctatattggtatgtatatggctgttaattctaatgtaagagctgctgctggcgcaaaaaagggattaaacaatgctcttcaaatagctcttaaaggtggtgctgttactggactagctgttacttccctatctcttttaggtgtagcgtccctatttcttatctatggaggtatttctggaaacgatactttaattaaagaagccccctctcttatagttggatttgggtttggtgcttccttcgtcgcgttatttgctcaacttggtggaggcatatatacaaaggctgccgatgttggtgctgatctcgtcggaaaggttgaagctggtatccctgaagatgaccctagaaatcctgctgttattgctgatcttgttggtgataatgtaggtgattgtgctggtagaggtgcggacttattcgaatctacagccgctgagaatataggtgctatgattctaggcgttggactttaccctatatttggatggaaaggaatactatttccgcttgttgctcgtgcccttggtatcatcgcttcaataataggtatctttgctgttaaagttaagaatgataatgatgatcctatgaaagctttaaaaggcggatttgttataacttccataattaatttagtaatactatttttcgtagttaaagatatgttaagtggttcacttacaactggtgggcaagtaaactatatctatctatatggatgtgcggttgctggaatactgcttagctatgtatttgtagttttaactgattattatacttcaataacgcataaacctgttaaagagatagctactgcttctaaaactggagctggaactaatataataactggattatcagttggtatggaatcaactgcacttcctgttgtttgtatatctatttgtatatttatatcttatagattaagcgaaatggcattgcctaatgttgcaaatgcaggtttgtatggtacagcaattgcaaccatgggaatgctttcaacctgcacatatattcttgccatggatacatttggtccaattactgataatgctggtggaattacagaaatgtccggagctcccgaagaaattagaaatataactgatagattagacgcatgcggtaatactacaaaagcattaacaaaggggtacgccgtaggttcagctgcactcgctacttttctattattctctgcatacctagatgaagttaaaaaacttcttggaaaacctttagattcatggttttcagttgatataggtaaacctgaagtatttataggtggctttataggcgctatgatagtatttctatttagctctacagctattagagctgttggtaaggctgctcaatatgtaatacttgaagttagacaacaatttaaagaaataccaggaataatggagggaacatcaaaacctgattatgctcgctgtgttgatatagttacaaaaggtgctctaaaggagatggttcttcctggaatcatagtaatttctgcccctataatcgttggagttcttctaggaaaagaagctgctgctggattcctaatgataacaaccatttctggtgttataatggctctcttcttaaataatggtggtggtgcatgggacaatgctaagaagcttatagaattaggagagcacggtggtaaaaattccgaagcccacagagctagtgtcgtcggtgatacagttggtgatccatttaaagatactgctggaccatcactccatgtacttataaaacttgtaagtactttaactttagtatttgtcgcattattcgcataaattaatattatttatcctgaattattcatagatatagttaataacataagaaagttagtttttcatgctattagctatttcttttcttaatttttaattatttttctaaatatacgtacagcttcgctacggacttt

SEQ ID NO: 141 - DNA, 12106 bp, Clostridium beijerinckii
cttatatatttgatttatagaatcataagtaatagaatagcaatataaattgctaaatatatacaattgattatttaatctaaaatattatttatgctaaattgtatgcaaattaatttcgcattgctgtatgagaaaaaagcaacttaaatatattaaaaatatgagtaaatataccaatttcgtattgattattatagacaataatgatattcttaattatatgataaataatttcatttaggaggtgtcattattatgagtatttgcagtttaaatccgggggagaaaggaataatttcatctattaaaggagattcaaaattagttaagagattatttgcgttaggatgcatcgaaggaactgaggttgaacttaggagaacagcgccacttggtgatccaattattataaattttagaggttttgatttagctattagaaaaaaggatgctaagaatatactattaaaaaaattataataatttgggcttaaatattttaattattagcaaaataggggagacttaaataaatgataaacgtagctttacttggtaatcctaatgtaggaaaaactacattatataatttactcactggctctaatcagtatgttggtaattggccaggtgtaactgtagataaaaaagagggttttctttttgaaagtataaaaattgttgacttgcctggaatatatgcaatggacactttctcaaatgaagaaaaagtgtccaagcaatttttagaagaaggtgatgttgatttaatattaaatattgttgatgcatctaatctaaatagaaatttatatcttacaactcaacttaaacaatttaataaacccataatattagccttaaatatgattgatgtttgtgaaaataaaggaattgttattgattatgataagttgtctaaagaactagatgttgaagtaattccaattattgcaggaaaaaatataggagtagataaagttaaggaaagacttaaagaaggaaactttactaaaccattgaatcatagaaagtttgatttttcatctgaaaaagaagcgtataaatttatagaaaatgtattaaaatcgtgtgtggcaataaaggaaaacctgcaagaaagtgttactgagaaacttgataagtttgttctacatccagttctagcataccctatttttcttttacttatggctttaatgtttcagttgacgttttcttgggttggacaaccgatttcggatttcttagatgaccttttaaataatattattataccgactgctcaccaactattatccaattcttctgattggtttagttctctaattgtagatggtattatttcaggtgttggaggaattatagtgttgcttccaataatattagtattatttatatgtataactattttggaagatagcggctatatggctagagtcgcatttatgatggataaattgatgagaaagatggggctttctggaaaagcttttattcctatgataataggttttggatgtacagttccagcaattatgactgctagaactttagaaagtgaaaaagatagaaaacttacagcattgctagttccatttatgtcatgtaacgctagacttccagtttatactgtattcgcggctgtattctttgaatctcatagaggattagtggtatcttcactatatttacttggagtcttagtagcatttttgcttggtattttattcaaaaatacatatttcaaaaaagatgaagaaccttttataattgaaattcctgagtataagatgcctaaaatatcatctatatataaacaaacattagataaagctagcggttttttacaaaaagctgcaactattatttttgcaatgagcgtagtagtatggtttttatctaactttaatcttcatggtatggtgaatcaagttgatgatagtatattagcatcaataggcaatgttctcgcaccagtttttaaacctttaggttttggtaattggcaatccgcagtatcattactttcaggactattagctaaagaatcagttttagcttctatgcaagtaatttttgcaggggatttatcggtgattttaccaattcatttcactaatatttctgcatatgcatttttagtttttatactactatatactccatgtatatcaacaattggtacgatgcaaaaagaatatggaaataaattaactttgttttcaattttctttcagttaattgtcgcatggattgcttctttcttagtatttaatttgggtggttttctttataaccttgtgcatttatttttaaaaatgaatagtttgtttttttaataattgttaagaatatgattaagtatcattatcaagacttaaatcatacttttataatagcaggtaggtgaagcttaaatgatagaaatattaatcacgattataataatttcttttgctggatttataatctttaaatcttttaagaattcttcaaaaggaaaatgcaactgtggatgtaagggttgtaaatctgagaaaatctgttcagacaaaagtaatacaggtataaaaattgttcaaacaaataagcctaataatgaataataaaaaatattaaatatattaacttatccactaaaagcatagcgttttagtggatttttctttaaactataaaatgatttatagtataataacaaaatgaagaaatttaaacctaagataaaataagaaaccgaaagtaggaattaaaaaatgaattacaaaacacatataaatggtggaatactagtaggattgtatacgaattgccaattggcaaatatgccacttatgtctacggcagtattacttggaggagcttttgttggtagtatattcccagatatagatcatggaaatagttatattgggaaaaaaactaaaggggtatcaaaagcaataaataaattggctggtcatagaaagttatttcatgcgccacttgtatatttgtttttatattcgactgccattggtatgtttacagataagcttatgttaattggaataaaggggatattcttaggaatattttctcatttagttctagatagcctaacgattggaggattgccatggttttacccgtttagtaaaaagaggttttctatttgtatgataaagacaaatagtaaaattgaggatatattatgtggaatgcttatatgtattaatatagtaatgctacttgacatgcttcacataacctcaatatttacattcactcatagataaaatataaaaaaatcgcaggcgactgtggagctgaagatttttttcacgcatctgccttttcgaacgcatgtgagaaaaatttggcaggcgaatatgatttgttttttattcttttatagttattaaccctagtaaaatatactactataaagttatcaacagatttaattgcattataattccctaaagaataaaaatatcctaaagattgattagtaaatctttaggatatttttataaggtgcattatgttggaaacaacaagtagcatattttaagtatttaatagcatatgatataattttacttcataaaattcaattcagatttatcactatttttaatttctcttatagccaagctacaatagattaatgtaataatggagaatataaggaaaaattctggcattattattccagcaacatgtattaaggcttcaagtaaaagaggtaaagtcatcgcatagaaacttaaagtacaagctctagagtattttagttttactcccataaatgaacctatagaaacagcaaatggaccaaatattaagaatcctaaaatcaaattagtaataaaggaattaataggattaacaacaaaaaaaactatcggtgtaagtattttaattatggaaagatagtatcctgaattttcgttattaatatttatacttgaaaaatcagaaaagttgatagttccaactgttctataatcttttctaagatatatgttattagaatcaagaaacacagcatctttgtaagaatttagaatatttttgtcaattttacctttagtatcaataataaaagtataataatttgattgatcagtacttacgcttagcattgagtcatcgatactaaaagttgaggaatcattttcaaggttgtcctgaatgcttatggcatcagagtcaagtgaatttactgtatttatgtttccaataaaacttgatattaaataaaatagaaaatcaccttcatgtttattgtaaatagtttcatctgaatcaacagataatacgccattcttaaattcaaaatttggtgcattatttgaaagatcattttgtactaccgatatttcgctagcaatcatatttatttccttaacattagttattactgaaaatagtaatgtaacaagaaaaacatataatattgactttctaagcccttgtgctaagaattcgctgtatgcttcaaaattaaagaaactataagcgaatttatctttaaatcccattatttttttcaaaaaaagacctcctaaaagaaaagttagataaatttaactgattcttgataattataacacattggataaaaatacaatagaaagtttgcataattaaatgaaatatgttatcattaccaatatcaaaaaaatttatgaaaaattaaatacggacagttcattaagaccatcctgtcattaaaaaaaactaggcattttaattttgaattattttaatttaagattaattttgttgcgctagttttagatgttacaaaattaatcttttttatatttaaatggaaagttaatttatggataagccttataaaactgatttcgaaaattttatagaaattatgtgaggagaaaaatatgtttaaaataaaaagtgaagtacaatttgatatggcacattatttaagtgggtatgaaggaaaatgttctaacatccatggccatagatataaattaattgcaaaactaaaatctgaaaagttacatcaagatggtcagcttaggggaatggtagatgatttcggaaattttaaaaacatattaaaagagattgcagaaacttttgaccataaattaattattgaaaataatgaagatgggaaagctttggttaagaatttggaagaactacaaaataatttcaacatttatttagttgactatagacctacagcagaagaaatgtctagagatatttttaatagattaaaagctaaaggattgtcagtgtgtgaagtagaattatttgaaactcctaataatagctgcatttatacagaggactaatggagggaaattatgtttaatataattgaaaaatttttatcaatagatggggaaggtcctacttctggtgaacttgcaacatttataagatttcaaggttgtaacttaagatgttcttggtgcgatacgacttattcatgggataaagaaaatacttcagaagttctaactgcagaagaaatttacaagtatataaaagaaaataaagttactaatgttactttaacaggtggagagccacttattcaaaaaaatatatatgaattactagaacttttgaactcggatgataacttaaaagttcatatagaaacaaatggtgctgttaacataggaccttttaaaaataaatttataaataatatcagctatattgtagactttaaacttcctagcagtaatatgatggatagaatggatttcaacaatttaagtattgtagaatccaatgatgtttataaatttgtgataggaagtaaggaagatttacaaatagcatacgaaataatatgtaagcacaatttaacatcaaaatgctttgtttatttgagtccagtttcgggaaatatagaaatgcaagaaattgtagaatttatgaaagataaaaatttgaataaagtaagattgcaagtacaattacataaaattatctgggataaaaatgcacgcggagtttaataattgagtggttattatatataatatagactagcttatagtaaattttatttttacaaaaggtttagaaatacaaggaggtttaagttatgccaaagaagatagatacaaaaaagatagaggaatgtataagagaaattattgttgctttaggagatgatcctgatagggaaggattactagatacacctaaaagggtatcaaaaatgtatgaagaagtttttcaaggaatgacactttcaaacagagaaatagcagaagcgtttggaaccacatttgagaatgaagattatgattcagaaactcataataatatggttgtggttaaggatataccaattcatagttattgtgaacatcacttagcgcttatgtataatatgaaggttacagtagtatatatacccaaagataagataattggtcttagtaaaatttcaagaattgcagatatggttgggagaagacttcaacttcaagaacgtattggaacagatatagcagaaatagtttctatggttacaaaaagtagtgatgttggtgtacttataactggagagcatggatgtatgacttcaagaggaataaaaaaacctggaacattgactacaacaactacttttacaggaaaatttcaaaccaatgatttattaagacaagaagctttactaattatgaaataagtaacgaacgaagaagcagtagtgatttggtatatttctatttaattaatttattttaggaggttttgaatatgagtaataaagcagtagttgtatttagtggaggacaagattctactacatgtctattttgggcattaaaggaattcgatgaggttatagcggtaacttttgattataatcaaaaacatagaaaagaaatagagtgtgcaactagtatagcaaaggagttaggaatagagcatcatatattagatatggggcttcttaatcaattagcccctaatgcgcttacaagaaatgatatagaaataaaagctggagaaaatggttctcttccatcaacatttgttgaaggtcgtaatatgctattcttaacttttgcaggagtattggccaaagtaaaaggcgcaaaacatatagtaacaggagtgtgtgagactgattttagtggataccctgattgcagggatatattcataaaatctcttaatgtaactttaaatttagcaatggattataattttgtagttcataccccattaatgtggatagataaagctgagacatggaagatggcagatgattttggcaagttagactatataagagaaaagactcttacttgctataaaggaattgttggcgacggttgtggagaatgccctgcttgtaagcttagaaaaaatggtttagataagtatttagaaagtaagaaaaattaaaatataaaatataaaacgaatttaaggagaaagaacaatgagtgaaagtggaagaaaatcaaaagaacttgaagggataacattgcttggaaatcaaggaacaaaatatgattatggatatacccctgaagtattagaggtttttgaaaataaacacccagataatgattattttgtaaaatttaattgccctgaatttacaagtttatgcccaattacaggtcagccagattttgcaacaatctatataagttatataccaaacataaagatggtagaaagtaaatcgctaaaactatatctttttagttttagaaatcatggagattttcatgaagattgtatgaatatcataatgaaagacttaataaaacttatggatccgaaatatattgaagtatggggaaaatttacaccaagaggtggtataagcatagatccttattgcaattatggaatgaaaggaactaagtttgaggaaatggctaattatagaatgatgaatcatgatatgtatcctgagaaagtagataatagataataacctaatgtattgcataaatgatttatgttaattagcaaagtaatgactgcaatacatttttattaaggagctgatatttaaattgagtaaagtaatagttataggtgcagggcccgcaggaatgatggctgctatacaagcagcaaagaaacatgatgtaatattattagatggtaatgaaagaataggtaaaaagctttttattactggaaaaggcagatgtaatgttacaaatgcaaaagatatatctgagttttttgagtatattccaggtaatcctcattttctttatagttcattatatagttttaccaataatgatacaatgaatttttttgaaaacgaaggaattaaattaaaaatcgaaagaggagacagagttttcccagaatctgataagtcttcagatataataagaggattatcaaacgctttaagtagaactaatgtaaaaataagattaaagtcaaaggttactaatatagaatttaaaagtaatagaattatagcagtagaaattaataatgaagaacgattatatggagatcattttatttttgcgacaggtggtgcatcatatccacttactggttcaagaggagaagggcaaaaattcgcaagtgtgcttggccataatgttactcaattaatgccagctcttgttccgatagaagttgttgattccaaaacaaaagaattgatggggctgtcattaaaaaatgtggaagttataattaaagaaaatgacaagaaagtagtttataagaattttggtgaaatgttatttacccattttggagtttcagggccccttatattaagtggaagtagatttatagaaaaaggaaaaagatatactttgcatatagatttaaaacctgcattaaatttaggagaattagataaacgtatccaaaaggattttaataaatatttaaataaagatttcaaaaattctttagacgagttattaccacaaaaattaattcccgtgattataaataactcaggaatattagaaaataaaaaagtaaatgaaataacgagagaggaaagaaagactttagtaaatgctattaaggatttaagctttgatataaaaggattaagacctatagatgaagcaattgtaacttcaggaggtgtagatataaaagaaattgatccgtctaccatgaagtctaaaataatagaaaatctttcgtttgcaggagaagttatggatgtagatgcttttacaggtggttataatgtacaaatagctttttctacaggatttatagcaggaagtaatatttgatataaaaaaatatttccttgtttggaaaggtaaaaaattatataatcttaatgaaggcataaatttataggatttggaaatgaggagaaagttttgaaaatttcagtagcaatagatggaccggctggagcaggaaaaagcactatagcaaaattggtttctaagaggtttgatcttatgtatataaatacaggagcaatgtatagagctgtggcgctaaaagcacaagaacaaaacttggaaccagaaaatgttcaagaaatttgtaatataataaaaactatggaaatgcattttgaaaatgatgatttgattttaaatggcgaaaatatacaggataaaataactactccaaacataagtagtattgtatctggatatgctagtatttcggaagttagagctattcttgtaaaacttcaaagagaaatgtcaagcaaatttagtgtaataatggatggaagagatattggaaccgttgttctaaaagatgcaaattttaagtttttcttaacagctagtccagaacaaagagcaactaggcgatttaaagaattgcaagaaagaaatatagagtgttcttatgatcaaatactaaaagatataatagatagagatcataaggatactcatagggctacagatccgctgaaaaaagcagaggatgcaattgagattgattctactaatttagacattaatggtgttgttaatgtaattgcagagtacataggaaaaggaaagtaacaaggagatagtaatgagtaaagttattctagcaaaaaattcaggtttttgctttggagttcaaagagctgtaaatgaagctatacggattcaaaaagaacataattcgaaaatctatactttaggtcctttaatacataataatgatgtagtaaaatatttagaagaaaataatatattttctatagaatttgaagaaatagataaattaaataaaggggatactattgttataagatctcatggtgtatctgaaacagttttagatacacttgaacaaaaggaactaaaagtcataaatgcgacttgtccttttgttgctaatattcaaaaaaaagttaagaaatattcaaaagaaggatatcatatagtaatattaggagataaaaatcatccagaagtcattggaattaatggatggtgtgatgataaagcaattatcactaaagatggtacttttgatgaagaaaatatgccgcataaggtatgtgttgtatctcaaacaactgaaaagatgaagaattgggaagaaacactgaaaaacttaagttatgcaagagaaatattagcttttaacacaatttgtgcagctactgatgttagacaaagaagtacgaataaaatatcccaaaaaacagatgctatgatagttattggcggaaaaaatagttcgaatactactaagttatatcaaattgctaaagaaaattgtgaaaatacaattcatattgaaaacgcaaaagatctaccaataagttttataaaaaataataatataaacaaaataggagttacagctggtgcatcaacaccagattggattattagggaggtactagatattatgaacacagaaaataataattttgaagatcaattatcattaatgaacgaattagacaaaagatttgttattggcgatgaggtacaaggagaaatactttcaaagactagagattcagttatagtttcacttgttggatacaagtcagatggagtgattccatttacagagttatctgcaaaagaagatccactaacatttgcagataaacttaatataggtgatactattaatgcaaaagttataaaactacaaaataatgatgggtatgtagtattatcaagattagaatatgaaagagaagaagcttttaaagaacttgaaaaaatatattcagaaggaacaacatttgaagttaatgttaaagaagctagagaaaaagggatagtagcagattataagggagctagaatatttattccagcatcacaaattgacataaagtttactaaagataaaagtgaatatgttgggaagaaattagaagttaaattgatagatttttctctaaagaatcctgtaaaattagttgcttcaagaagagttttattagaagaaagcaagaattctgaagacgcaaaagcttgggagagttttaatcttggggatgttataaaaggtgaagtaaaaagatttacagactttggagcttttgtggaagtcaatggtatagatggattattacatttatcacaaatttcttggaatcatatcaaaaaggtaagtgatgtattaaaagaaggtcaaattattgatgttaagattattggtcttgataaggaagctaaaaagctatctttaagcattaaagaacttgtagctaagccttgggataatgctaaagaaaaatatccagaagggtctattgtacttggtaaagtagttagattaaatgattttggtgcttttgtagaattggagccaggagtagatgggttagttcatatatcaaagatatctcataatagaatagagcacccttctgaagttttaaaaattggtgaagaaattaaagctaagatattaagtgttgatgaagaaaataaaagaataagcttaagtataaaagatgtataaaacaaaaaaggggctgttgcaaaactaacatagttagttttgtagcggctaatttttttagatataaaaaatgtgaattccgaagaactcacattcattgtataatttacttatgctaaaaaccaaattacacaataaagattatactgagattaatgataattttcaacttatatta

SEQ ID NO: 142 - DNA, 12043 bp, Clostridium beijerinckii
atctgaaaataattttttactcattcttttcacaaccttactatatttcttcttatcttttattgtacaaaaaaagaacctattgaaatagtctttttttagtgtctatttcataggttccattttatttaactgactttcttttaatttattgtgtattcttttttgctctgtaatatcagtaactatccctattatccctaatactttattactctcatccaaattaggcgttcgacttacaatagtatcatacattaacccatctgcatgagaaatggttgtctcataattgttagctttcttagtattaatcacttgattatccaagcttgcaaatagatctgctacctgtttggttgtaatttcataatccgtattccccactataaattttctttttactcctattgctttttcaaatgctgtattacaccacaaatattttccatatacatctttataaaacattggatttggaattaaattaaatatcttatcatcaaattcttcattaaaatgtattttttttaagtctttattttctttaaatatactcatcctcagtgccctccaaaatactataattctctttattaaatgggcaatttcatgatgatggttgatccttcaccatatacacttttggctaacaaatgacccttgtgtttgactacaacaatatcataacaaatgcttaaacctaaaccagttccttcccctggttcccttgtagtaaagaaaggatcaaatattttatttatattttcctcttcaataccgattccattatcacttatctctaaacaaaaatactcatcttccttataagtcttgatatttatattgccttttctatctttaattcctatataataaatagagttttttataatattaaaaataacttgttcaatttgaaacctgttacacttaatatagtcatcctcaattaagtctagttttaagtcaaataaatcatcaagcttgtattctttaagttccatttttaaaattttcatagattcttctattaattcactgatcttattcatttctaagttatcataagcatcttcattagaaaatctaataatatttttaattatgctgcttatcttttcaagaccttcattagtctcagttataactggttcaaagtctgacaatataaattctaatttgctactggaatcagctaattctttaagttctttattatcaaaaaaacactcttcattttccttaataaaagttaaatatttatctaaatattcttttagagttttagcataactttgaattgtatatatattagaagtaacataccctaaaggtgtattaatctcatgagcaattcctgctgaaaaccttcctatagtagataatttttccctatttactaattcaatttgtgttgttttgagctttgcatttgactccttaagttgagcattagtattttttagattattataagattccatcaaagcattttgatattccctcatctttattgctgattttaatcttgatgtgaattcaataggctcgattggcttattaatgtagtcattagctccaaattcaaaactcttttctaagtattttttatctgttagcgacgtaaacatcaaaataatcacattcttattgtttcttcttataatctccaaggtttctattccagataacttaggcataactatatctaatagtataatatctatattctgagtattcataatttcaatagcttcttctcctgatgctgctgttataatattgcatttaatttcactgattttaattacttctttcgcagtaattatattaaactttgtatcatcaacgattaaaatattcataattcccaactcctaatctgcaatttttagacctgtattaatgtttattaagaacttatcaggaactataataatcttacctccaaacattttacccaaattatctaagaaatttaatattaatttagcttctgtcttactaatagtctttaagaaattattcttatttctaatgaagaaattgatatttaaagtagttttatgtgtgaagtttaataatatttcgtcttctttcgaatcccaagtaataacttctaaaacattattaaatattaactcaaatactctcttgttacctaaataattaatttgagcagtattattattatcataaattatgggtaaatttctgctttttaattcatcaaacttggactgtaaagagtttaaagtgaaggtttcagaaatacttggaatagtctctaaatattgaaaatatactttatctatcagctgatttatatatttctgcctagagcactcatcctttgaattgtcatacatattattttttaaatcaaagattatttttgaaaccactttaatataattaatatccttttgactattctttactaaattgttattactatcaagaatctttttgtataacttatttttttcttctatttgaactttaaatatttcattttcctttactaatttataatactctaaagcttcatgaatagctggaagaaattcctcttcattattccatggctttgtaatatacttaaaaacgcctactttatttactgtaactattacctgagatatttgagcatatccagagagtaccattctaacagtgttaggagatatttctttaactttttctaaaagctctaaaccattcatcttcggcattctcatatctgtaactattacagctatttcattttcttgaaattgttctaatgccttttcgccactagctgcaaaaagtgatttaaaatcttcttgaatagttattctctttattgaatttaatatattagtttcatcatctacaaaaagtacattaaatctgtccatattaactcttcctttccaataagttttttactatctgttcgcatctttgttcatttattccgtaattttgcaaaatctctagataaagctttggtgcataacttggttttattattttccaagaataataatctgctatgtgaatcattgataccagctctctatttacctcactacttgacataggatcatgatgatataatgcactttctactactgcataaggtatatcccaccattgtaatagatatcctcctaattcttcatgatcaattttaaatttttccttctctaaactatttatttcatttaatgatttataagatgctaatttgtaaagctcatcatactccttatcatatatcttaaagaaagctacttttcctatatcatgaagaagacctgctgtaccgtaataatcagggatctttttacctaaagctttgttatatagctctattagtattttattagttaagtttgaatgctcccatatttcatttttattataaaaatcattttctgatttaaagacttctgctgtagccatgattgcctttaaatttaccagcccaaggcttaatactgctgtctttattgaagctgtctttatcccataaaaggctgaatttataattcttaggacttcagaacttaaagttatatcagcctcaattaatcttactatcctatctatattgtgatcatcatgttcaacaacatcgtttatttcttgtagtacagagggaattgtcggaagcttgcccatttcttttatatgatttaaggatatattattatgtaataattcctcagttttaaaaacctcatcaatagcccttctaaaatcatcctttttccaaggcttagttataaatagctttgccaaattattatagatagatttaaaaaccgttttttcatctgtaaagccacttaatattaatcttgttacctcagggtatactaatttaaccctttttaataattcatacccatccatttcgggcattctcatatcacttactattagatcaatatggtttttttcaagaatatctaaagcttctcttccaccgtttgcaatatatacgtcataaggactgtcaaaaaattctcttctgattgaatttaaaatagctttttcatcatctacaaataaaatagacttactcattttgggtcacctcttcctgttcttcatgtctagtaggaagttttatagtaatctttgtaccttctcctaaaacactgtcaacaatcaaatctcccttatgagtattttttataatatcatatgcaatacttaaaccaagtccagtacctttacctataggttttgttgtaaaaaaaggttcaaatattttatctaagttttctttaggtatacctgtcccattatcttctataacacaacttacaaataaatcatcactaaaagtatgaatttttaataatccaaaatagtctaaatctgccttctcttgtttttcctttatagcgtgagaagaattaataataagatttaatataacttggtttatttcactaggaattgcttccacttgtggtatttcatctagttcaatttcaatattagagttatatttaatttcatttttagctataaccagagtatttgttattccatagtttaaatcatattgttcaaaattcttttctacagatgaatgagcaaaatttctcattgcggctattatcttctgaactctttcaattccaccttctgtatcctttaataactcatcaatgtcatccattataaaatctaaattatattttctttctagattctcaacatttgccacttcatctttaaccaagcacattccttcttttgaattagccagtaaacttttatatagcaatattatctcattaagcttttcaacatatttttttaaagttccaaaattacttatgataaagcctaaaggattattaatttcatgagctattccagcagatagatgacctaagtttgccaatttatcttcttcaatcatcataaattgagcattttctaaatttttaatgctcctttgcaattcttcatctttaagtttcaattgacttaggaggtttaccttttcttcaatattttcagaaataataagatatttcttaacatttgaattttcctcaaaaatttggcatatagatacctttagacaaaatacagaattttctttatttttagcataaatttcaccattccaattttcaaatagaaatagatcgcttatttgacgtatcttattatcttctgcataactactttcaaaataaaataaattattaatattcatatttttaagctcttcctcagaataattccacattttttcagttgaagcattaaagaattctaactttccattagaatcggtaattagtaaggattgcttgatatttttgattatagtctcaaataaatatttcatttccataaaaactcaaccccatttttaaatattcttttatattactataatttctacatcaaataccaaaatccttcaactttacatttatttataacttattacacaataaattatattctatctttaaaaattcatttactttttctatttcttgtcaaataaaagcaacttaaacctaaaaacttatataaaataaataaagctgagactttctaaatactagaaatcctcagctcaactaattttctattacactttttgtttatcctaatcagatatcatatgcattttttaatttcaagaaataatcatttgaaatttgaccacttaaatttattagtaagcagttgtttaacttggtacttatattaatggcttagaagtacgcaaaaatatgttgtatttaaacgctcccaagtatataactccaatttttgattgtgtgataataacttaatcagcgaacaaacgcgagtaaattttctgctagagcttatttaatttagtacttgtcacactaaaagtagaaacatgaagctatggaaggcaatcctcaatttagagctttccagcgaaaatttttcctgcaattcctaatgcgctacaagctttagggaatcctacatatgctgcacattgcaaaataatttctaagatctcttcttgttttaatccagctttaagagcaccttttatatgaaaatctaattgttcaaatgcgccttgtgttataagggcagttattgttacaatttctcttgtttttaaatccaaatttggtcttgcatatatttgaccaaatccaaaagaaatcattttatccaaaaagtctggaaatatctctcctacagaatttatcatctgttcaccattttcatctgtcatttgttttaacgtattaattccgttttcataatctttattcattttactatccccttttcatagttggtggtatttcatttggatcaaccataacttctattagaattgcttccttatgtaaatttgaaatttctaatgcttcttttaattcaagttcattgcagcatctatatgattttacaccaagtgattcaccaaattttttaccatctaatggtacattataattggtccctactgtctttccaaaaaactttatcatagctttttctggcatatctaatcttccattatttattactataaaggtaactggaatattataatttgctgctgttgaaatttcagctccctgcataaaggtacatccatcaccagttatgcaaacaattctagaattatagtttgctagttgtgctccaattgagtaacctatggcatgtcccatagctccaaatacgtcatcaaaaaagaatgtacctggttttctgatattaaaatatcttattgcataaaaagaatgactaccatcatcgccaaaaacgacagcatcatctggtaatacttttcttattatttccatagcatgagcagatgaaagatacttattgttttctttaatattatttttaaattcataaatcttttctaataaagtatattcttttcttctcttatctttagctttatctaatactagctgtagattagctttgatatcgccaataataggtagagttttaactggtaatgctttttctatgaatgtattatcataatctaaatgaactacttctttaggataattgtctggtgatattcctactaaagacatatcagatagtttacttcctatgactatcattaagtctgtatctttcttaatatattcacttgatttatctgtaccgcctaagcctaatgcgccaagtgataaaggatggttctcagaaaatgttccttttcctcctggagtcgtcataactggtatgtcccaaatttcagctatgtttttaatttcttcgtaagctagacttgaatgtactcctttgcctgccaatataacaggttttctagcattatttagtttactaacaaattcatctaatctcgaggatattagtttatccatattgttaggtaaatcaagttcaaattcatctatttcttcatcaagtatgtcaagaggtattgataaatgaactggccctttgacacctgaataagctttttctaatgcatgttttaataatatttgaaactgatcagctctttcgactctagcactaaatttagtaactgattcaaacatcctaactaaatctgtaccaaaaattgttgaatcttgtcctatagctttcccaatattatgcatagattgctgcccagtaataaatagtactggtacatggtaagctttagcctgtcctgcagcagttaatgcgtttgtgcctccaggtccagaagttacaagagcaacacccaatttcttgttaattaatgagtaacctgctgctgcataaccagcgccactttcatgtttacttaaaataaaattaatatcttgtctatccaattccataatcaaagaagcaagaggtcttcctggtactccaaaaacattattaatcccccatttcctaaaattggatactaaaatagatgctatgtttctcatatgtatctctccttttataattaatattaatattctaaaaagtaattttagaatattaatcatcttatctgatgcccagctacactaacacttatatgcttcctgaatcaagttttaccttattccaaactaattgctgcatagaatcccatacgcacagctgtaccaacgttcccaactttttcacaatcgcctataaacctagtttttgtataatattttgcttttattgcctctgccagtttattgttcattaccatgcccaaggcattaatcatactatcagcttttataaattcagatgaaccatcatgtgtttctatataaacaccgttactatcaattgatgtaactttgctatttgtatgaattttcactccagatttataaagcataggtattaatgatgctgcattagcaaacaaagcatcctttgcaactgaatctgacatttcaataatcgtaactttcttaccatattcagtagctagttccaaagcactatcacagcctgataatccgcccccacatataacaatattttcaccttttaataattctttatttttatgtacctcaattaaattaataatatttaaaccgtcgataccaggaatttgaggattagctggaactgcgcctgttcctacgatgattttatcgcactttgctaatatctcatcagcagcagtaacttctgtgtctagttgaattttaacattcaatttcttaagctgaacaccataccaatctattaatctgcataacttattcttaaaagcaggtgtcgaaactgctgcaatctggcccccaattactttttctttttcaaatagagtaaccttatgtccctcaattgcagcaacacgtgctgcctctaaccctgctggccccgctcctataactacgacattttgtggaattttagtatgcttaatattaaaacgcttttcattacaagcttgcggatttacagaacaacttaacttagtaaatctagctgcaatacgtcctatacatccctcattacagcgaatgcatggtcttatatcttcacgattaccacacataagcttatttggtagttctggatctgctattagaggacgtccaaacatgacaagatcagcatttccagattctattaacctaactgctgtttcgggcgtatgatttcccgaattaagtattggaagattaacagctttgcgtgtaggctcacataaatattccatacatgcatctcccaaatatgaaggtggaaaaacatattcaattgcttcagacgatcctgcatctatatctatggcatcaactcctacctcttctagtagtttaataagatgcatgctgtcttctatagtacgcccaccttcaaaacgatgatcaagtgacatacgaaataatattggcatatctggtccaacagcatttcttattgaacgaacaatttccataggaaatcgagcgcgtttttcatctgttccaccatactcatcctcacgtttattccatattggagacataaattgatctattaaatctccagcatgtccatgtatctcaatcgcatcaaaacctgcatttttaacatttttggcagaatatgcaaattttttaataatttcttttatatcgtaatgactcataggcctacaattaacttttctattatatgctgctggtataggtgatgctgacatcggtggctctccatattcgtttggaagtgcattacgtcctgtaccacaacataattgggcagctattcttgccccgtatctttgcacagtttcacaaagagtagtaagttttggtattacatacgtatgctctaatatacctgaaagaggcccttgtgctatatcatgtgagataaactgagcgcccataattataagtccagctccgcctcttgcacgttcctcataataatcaatttcatcatttgaaatagtaccatcactattggatgcattaattcctataggcgaaaaaactattctatttttaacctccatgtttccaattttaaatggtgtaaataacttcttatagtccataataactctgtcattcccttctcgatacctatcaaaatctatatagatacattaaataaataactcaatacttaaatagctcagtctataaaattttttcatatattacttttataaatatccctttaaaaataaatatcagaaaattcaacattaatggcatttactaatccattatctgaagatataaatgctctatttttctcctcaaatgtaacttctttaataggtagcgttattgtgaatttactgccaattcctaattcactttctacctcaatgcttccttctaatatttctaccaacatctttactaatgctaaaccaatcccactaccttctgcctgtcttgaaagattattatcaacttgtccaaatcgttcaaaaatcacttcacgtttatcttctggaatccctaccccagtatcaatcacagcaattgatactgttttattcttcatattttctgtaatctcaacagttatccttccaccttctggtgtgaattttattgcatttgataaaagattcaaaattatgcgttcatatttttcatcatctattgaagtatttatgctatatgtattagttttaaatccaaacataatctttttttgatctgcatatatttttatagattctgcaatcaattgtgttataaatacaatatctatgttcttttggtttaatttaaattgatctgcttttaacttggtaatatctaacaagttatttacaagcctcaactgcctgaaagcatttcgctttatgcttcctattaagtttttgactgattgaggaatctgattaatatatacctgttcaatcaattgaatagctgaataaattacatttattggtgttttaaattcatgagtaataagggttataaattcatctttcatcacaaggtctttttctaaaagctccctttgctttttttccgattcatataatagttctttttgcttattaagcttacgattttgttttctaagcaatagttctcgttctatggcatcaactacagtagttaatgtcattagaaaaaatggattatgaagtataacagccgtcattatacatatagttccaagtaaattatcatcatctgaatagtgaaatggtactccataacatgcgctcttctgtaaagaattatgataatgatcctttcctattatctgtattggatgattttgcttaagagtcaaactaacaacatttgttcccatatcctcctcgcgaaattgaatacctggcttaactccaaattcaaacattgtttctcctatagcttcgtccccaagaatttctaataaatacccgttctcatcagtaatagtaactaatataggagtaccttctaaagatttaatcattttattgccaaaaaatttaacaacatctaaaacttctttatatatatctttctttttagctaattctaattctgatatagcattaggagacactctaggtttgttgggatctaatcctaattttctacacttcttttttgattctataatataatcggcttcttgttcatctatatcttgcaacgtatattgcctcctcaaaagaaaactttagtaatttatgtatatcgattcacttttttacataatttacccaactattatatcactaagtttctattatcggaatatttattctaattaatttcataatttacaattaattcatatacattttatatttcacgtttttaaaatcgcaaaaaaatgtaaaattgtaaccaatattacataaaaattattcaaattagcagaaataatttttcagctatctttactattttcataattcataataattgtcttttagaaaatcttttaatgcatcttaaccctatatctaataaaaattgttacattgttaacttcttttgtttctaacttcttaacttttttcctttttaaattgtaaaaaagttttattttaaaaaatgttcgttcaaaaaaacatttatttgtgacttgcttttaaacgctttgatttatcatataaaaatattac

SEQ ID NO: 143 - DNA, 11766 bp, Clostridium beijerinckii
atatataattgttttagtttataaacttttgaatctatgatacaatcaattataaaattgtaaaatcatttggattatatgatttattataggcatatgaaagaaaatatacgagagttacgacttgttattttatgaataggctttacactggagggataaacatgaatgagaaacaaatagaaatgatgaagaaattaatagaagaaaagaaacaaaagggaaataacactaaaaataataaaagacctaagaaggttattggccgaatgttactagataatggaaaaacaactcaataaaacattattattctaaggaaggtaatgtaaattgaaataaatttactttaacttcatatagaaagttcagttattctttcttcaacaagatcttactgatacttctgaagtcggaatagctgggttactatctatatataatagatagtctgaaactcttctaaagctctctgttcataagctttataaagtcatcatgtttcattagtattgaaaagtaaatgcttgaaccagttaagaatgtgtttgccattggtacaatacttaaaattattagactcgcaagcacctgccattcaagtttattacttttaaagtcgatttctttcttatttataaatactctgataaaaaataatactagaaatatgtagcttaatactgtagatattgaatatagatattccattttatcaagtccttttatttattttttatgtacattactattgtatacctctattcaattaatttccactaaagttacatttttatggttattttttattcatcttatttgtaattacatttgagaaaaatctggactataagaaagcactgcgcgtatatgactttagcacaatgcttttataccgaaaattatgttaaagatttaggggtatttcttcgtacaattcatctctttcatctgagtaaagccagccttcatcttctgcataatcaaatatttcttctagaagtatatcgtattctttagcaaaaactgctggatttcttttatatttatcaatcgtttgttcagggaaatcgttctttctaatcttctcttcaagcacaagtgcttttaaatatgtacttcctatcagttctctaatcacattatacctataacttctcgcgctacagatataaagcctacatattactggtctctcttcatatatagtgcatagatttgtttctgttatgaaattacagtcagttttcttatctaatacatactgatcaaaatccctatagtaatttctctttttaactaacttttcttgcacaaaattcgaagcagcttcattatcccaattacttagtttattcacacatacattatccatttcaacagaccaagactttttgcagcagctctcctcacatccattacaatcaagaggattattatttaaaaatatatcaattgcatctaacacatctttaactgttgtatttttagcaattttgtcataatttacttttccttcgccatcaaatagtaatttcattttatagttcctctatttcaaattattttttcttaataaaaagagcctaaagcagaaaattttaaaaaaatactttcaactttaggctaaaatttttagtctgttaatattcaggtagttaaataataactacctgtaaatttttaatttccccaagaatgcttccgagacacaaaatgtggaagtcgcttttttgtaagtaaaatagttttatattataatagttaatactattagtaacgctataatttattacttaaactttctctttctagcttcttctgactttttctttctttttacgcttggcttttcatagtgttgtctcttttttgcctctgaaaggattccagacattgaacatttctttttaaatcttctcaatgcttgctctagagattcattttctcctactttaatttctgacatacttttatccctccctccggcgctgtattgtaaaccacattaatagtttacaaatataaactcataatatactatacattatttactaaaatgctgtcaatgccttaatagtttagtaataaagtcttatgacacttctaagctagatattctgtggtcctctgcactttttaatgtatataaaaaaaatctgacaggtgaatttatttttttattctcgtgattgcattcaagatcatttgaaaatattgttttataatttgcctacagatttaattacattatatttttctacgaaaataaaattattatactttgtaaagacttttccttcataggtagttcctaaaatagaaaaagaactcccacataaaatgagagttctttttacgaatcgaaaatcaagaaatttatatgcttttaattttaagaattaggatagtcagtaactgattgcttcatattaccagattttgctgtattgcccatattatttactacgtgtgttatctcaccattaccagataaaaatactgaacatgcatggtgtactttaactccagatgcatttggaacctctattccattattttctgatactacagcatccctaaagtatgagtaaattcctgatccaaaaagctgatgagaagtaactgaatcagccactttgtaagaagcatatccgttttgagtaccattattgctcatccaagatgcttgatttggaacatcatatggtaattcactttgatagaagtatacttttccaccattaccattccatattgtttgatattccttaaagtgctctacaaacaatccatataatgtaacattattaccatttacaataacaccattttttgcattgttaactgtccagcctactcctgtaccgtgatctgcacgccatacccagaaatcatcgcctataacattattactatttatttttagacttgtatcagcatttcctactgctgccccaccaattctaaagaataaatcactaagacttgtaggattagctgagtgatcagcagaacttccatcttgtccaactttcaataatactggtgaattctttgctccagcatcaaaaagaacaccagaaacttttactccgtcaacatctgaaatattcattgcggcagtaccattgtctgggatcaaagttgcaagtccaagacctaatataactgtattagactttgttacatttatagaatcactaagatgatatactccaggagtaaatataatgttctttccttggctaagggctgcatttatgctttcagctgtagatgtatctggttttgctatatagaactgatctataggtaatgatgtaccttgtcctagaccatttgcccaagttattccttgagaattcttcctaagatcaggaacaaaaacttggtaatttccactatcatcaatataaagaaatggtttttctctaatagctggtgtttgactgactactgtatctggtgttgatggatatgcattgtcatctgtaggtgctccattgttccccacaaacaccatgttccagtttgcaccattccaagatcccatttgactgtttctagtaaagaattgttgttgtgatccggaagtaattgaattatcaatctttgaatcagctataaatccaccactagaccaagctccatcgtaattagttccaagtggatcccataaagacaatccacctttaatgtgaacacgtctcattggtgcagcttgtgatactgcccaagttaaggttcctgctggcgctaaattattagaagaataagttggagtgacggcaacattttcaaccgatctccagaagttacaagtcgcatttcctcccatccaatctgcttcacaacgtactgcaccagttatattaactgcatctggtgtctttccaagtcctaatacagacgtaaagaaacctacatttacatttacgttatatgaacctggcttaaacaaaaaggcatatctttcatttccaaactgatttgtctccatcttactaaatacgctatcaacagtattttgaatatcagaacttggcattgatggatcaaatattttaacatttggacctaaatctacattgttagctgtattaccatctggagtaccgtatacttcaaattcccatagagagtacccatattgtgtagttcttgatgttccaagcattcttatatatcttccggttgcagtagaattaaaagttatgttttctactcctcctgttcctcctgtttttgtataagcatctatccaatttttattatcagttgatacttgtatcttataatcttttgcagcagcagtttcccaatttagttttactcctgagatattataatttccacctaagtcaatacatatccattgaggatcactgccttgagtagactcccacctagttcctgcattttcatcaacagctaaagaagcagtatttccacctgtaactgaagatgaagttgccgacttatttaacgcaatattagttgctacagctgcactttgtgtagatgcatttgaggtaatttcactgtttgctcctaaacttacagtttcagcctttgtgataaatgaagttgacataaacatagtagtaaagacagccattgaaagagttaatgataaaattcttttatttctcctaatcattattaaactacctcctaaaaatacaatttaaccttatattttgaataattagcttcttaattaaaaatactctacttgttttgttgcaacaaagacattaatttacttaactgttttgaggttaagttttatattttacttcactaatacctaatactaaagcgctttagaattaagcatgatgaagataaatatcatattatttaactgaatttatttaattagtaactggaagtaggttttatgtagagaacttaattaaaacgtatacataaagtgcttccatttactaaacaacaagaatttgcttattagatgactatatttacaaagttgctgaaactttaagttaatatcttcactagaaattataaatatatttgtaaccacaagagtcataatatggagaaaacatttgaaaatgagctatcaataatattgctttattcattggtgatttcattataaacgagaattttatagttatgtaaaggactatttttatgatatgctgcttgcgatgtgtatgctttactttataccttgataatactctgataaaaaaccaaagtaaacaccaatttctttaaacattcatattttagaacaaaacgcaaatattcaatatatctttttataaatattccttttattcttaaaaatgtgcgtttaattcttataaaaatgcaaaagccatccatttcactggatgactttctatagaattaatatagcttaaataattttactgctgtttttgcaattttatatacaggtgtttcaagctctctgcttgcattcttaagttcttttcgaatttctatgtgctgtggacaatgcttttcacatttaccacattcaacacattgtgaagcgctgcttggatttttacgcactgcagtacacattaggtaattatgcctgcctgactttttattctcagaatacatgagattgtacgaatgaaaagttcctggtatatctacccccttaggacatggcatacaatatccacaacctgtgcagccaactttaatatttctatttagctcatttttaatctgttctattaagtcaaaatcttctttggtgaattcaccaacctccacattacttgcaatatctatattttcccgaagcatttcaagggagttcattcctgataatacgcacgtaacctcaggctgattccaaagccatctaaatgcccattctgctggagtacgtttctttgaattttcctttattatgttcttagctttttcaggtaataaattaactaatcttccaccacgtaatggctccattataattacaggaagaccttttttattagcagcctttaatcctctttttcctgcctggctatgttcatctaaataattatattgaatctggcaaaagtcccaatcataaacctccagtaactgaagaaaagtttctgtatttccatgataggaaaagccaacattacgaatttgcccattttgaactttctcttttaaccaatcgtctgcgcctaatgcttttaatctgttccaagtctgcacatcagtaagcatatgcataaggtaataatcaacataatctgtttgcaacctttttaattgttctttaaaatatttttctaaatccttctttgacttaaccataaaatgtgggagctttgttgcaataaatattttctctctacatttatttctttttaaaatttccccaagtgtagcctcactacctggataaacataagccgtatcaaagtaattcacaccgttatttatcgcttccataatttctttttctgctttatctatatcaatgctggccccttttctagtaaaacgcatacatccataacctaatattgatagcttatttccatttttatcttctctatatttcatttttgaagattcctccacagaatccatcattataaccacctcatcaacaatttatataatatatgtatattataacagattgaactttttgccaatagcagatctgatattatttcattaagaagaatatggtaattctgactctaaaatatgattgattgttaattaattttagtctaatattgttgttaccgctcagtaaattgctttaatgataaatatatatttgaaatcatagtaacgcaaatgctgagttcagattaagatgtaaaaatctaattactataaaatataaataaaaatttctaagacaggagaatagaaaatgagaactaaaagaaactatggttttaatgactattttgagttgtttttatatgctcttgctgtaatttgttctatctattttcttattagaggcgatatgcaaagaacacttcaacccatattaataatcctagtgttaactgttataaaagcattaataaagaaaagtagaattccaatttcgactggtttaagattttctgttttagcattcatttttgttactatgttttttgctaacgaatttaaaggttattcatttataccttatcttgataaaatagaacatttgtcgtcaggggttatactcttctatataggttcgttaatattggagcttataaataaaaatgaaacaaataagcttaatataaaaacaattatcctttttagccttttctttgcaatagctatggctggagtttgggagatttacgagtttacaactgatagattatttggtcttagaagccaaaataacagtctagtggatactatgggtgacattatctgcggaagtattggagccctatttactagcatttacgcttacaaaaatttaaaagtaaactttaaagtttcatcagaagttattggtgattctgacaacttataaaatagattttaattatatctttaagataaatggtatatatttgcacattaattaaaggcgtctagtaaatttagacgcctttaattttttcttatagattattattaatattttattttaaaaatattatctaaattctgttgttccatcaggatattgtgcaaatcttcctttttctcttgggtgaacaaaatcgtcacgttcccatggccagcccccaaaaccagtgctcttatagtctgcaaaagcatccataatttctttatctgatgtcataacaaaaggtccataacttacaactggctctccaataggttctccttctaaaagcagaatacagctttccttagcgccattttctatttttacaacttcatcacctgcaagttttacactattataaacatcaatatcagttccttcaatccttattgtctctccatcatagaaataaatagttctatttaatgttgaagataccttttgaagttctatacttgcttcaggttctatacgtataatacatattcttacatgattattatctttacttgcccatgaattaggcgaaggttctaggctcttagtaccattataagtacctgagataattcttacagtacttgtttttccattattgtcttttgagtttataactggtatatcctctgcccaaagcattttataatgtggttcaacgaatttatctttcttaggcagattgagccagatttgaaataattctagtggattttccttttcagtattaactaaagggaacatttctgtatgattacagcctctacctgcagtcagccactgcacatcattagctccatagcgtcctgtagcaccagctgaatcagcatgatcaacatatccatctagaactattgtgactgtttcaaaccctctgtgaggatgctgagggaatcctggaatggtatccccatgatacatattccatccatcaattcctctaaagtcgttgccaatagttctcccatacaaagaagcatctggtcccatctcactattaccctttggataagcatccttatgatgtgcacaaaatataaaaggatcacttgtctgccactgtgaacttagcttgcttattttaagtatattattttttcccatttcgtaacctcccttgatacttcatataatttataaataatctttaataattcccctataatatcaatcaagttagaattatctaattttaaaaaaatatattgattaaattttctccattttattatgtgttacttttataaatccaatgagatttataaaagtaattaattgataatgattattatttattaacaaaattatagcatagctttcatgatttgtatattgattctaataatttattgcattttattaatacgtagtatataagaaaaatttctttactgtgtatatattctttgcaaagtccgtaattctatctgagatattgagccatttatatttaataaaatgaattgagaaaactttaacaatgaatttcacgctttttatgcaatatcgtaaatgaacaatattattatagaattattttatattacatattattaatttttccttctaaattttaatgaaatggcggtgaaactcatatattagtatttttcaatactaatattatcttattaacttataaagtaaaaaaaggttattaaaggtgataaataattaacaaaattgctcgaaaaacgttgattaattgtactgtatcctatataattatctttaaaggatggaaaaataatcttttctccaaactttaaaataatattatgaaagtgagggtctcatattgaaccaggtaaacggaacgaaagaatggtctaatcctagtcccgcaggcctagttgctttagcagtagcaagtttctgcttttttgccttattatcaggaagagtaacaagcggagccttaccacttcttggatgttggcttattggaggatttgtagtacaagttgtagttgccttaattgatttaaaaggcggtaatactactggtggaaacacatttttattctttagtgcattttttatgttaacgggtggaattgaaatgctcattaaatttaatgcggtaactaacggaatttccctagatacgcgtattgatggttgggcatggttagtacttagtatttcacttattatgtggacacccgcattcctcaaaacaccattagtgttgtcgctaatcattttagctttagatctatcttcactctgtatttctctaattgatttaggagtattaccaaagattttttcaaatatacctgcctttggattattaatagcaggtattttaggaatttatcttgcagctgcaattattgttaataccgcttttggtagaccaatctacccttcaccaggtccaattattaaatagatatcgtcactttaactatactaccctatttatcaaaaaagtaaatgtatacatagaataaaaataaagactaaaattctctaatattatttatatatcagagaattttagtctttattaggttttcatcattataggatatctcataggtacacaaaagattcaaagttataataacatttgtgtgtacaaataaaattcactttattttaatgcatttaaagcagcttcataatttggttctgatgttacttcctcgcaatattcaacataagtaaccttgttattttcatcaactacaaatactgctcttgttagcagacctaattctttaatgtaagttccgaattccttaccaaagctcctatccttataatctgataatgtttgtactgcatcaataccttgatttccgcaccatcttccttgtgcaaaaggtagatccattgatattacatatatctttacattgtttaattttgcagcttcttcattaaattttcttacttctaaatcacatactggtgtatctattgatggaacacttacatatgctctctttcctgtaaaatctttcgaattaacagcatttaaaccattatctgttactacgaagtctggtgcagtatcaccaactttaatttctcttccttctaatgttacttcatttccttgaaatttaactttcataattcattcctcctaaattattaatattatattttaactattttcttagtggtttatcaaatatttttctgccccatatatactaacggctccatcagcagcagcagtaagtacttgcctaacttcttttgttcgaatatctcctatggcaaatataccatctacgtttgttttacagctttcatcagcaataatataaccatttttatctaaagcaactaaatctttaactaattctgacgatggatcacttccaattgctacaaaaacaccattaacttctaaattatctatcttaccatctttattattcttaatttctataccacttaatctttcttctccattaagttttgtaactccactattccagattatttctatattatctgtttcaaataactttttttgagcagatttatttgctctaagtgaatctcttctgacaattacatataccttttcagcaattcttgaaagatgaagtgcatcctctactgctgtatctccaccgcctataacagccactattttctttctaaagaagccgccatcacaagtagcacagtatgatacacctttacctgtaagttcctcttccctatcaattcctatttttttaggttttgcacccattgataagattatgaccttactttcataagtattcacaccagttacaactttttttatatctccatcgatctttatatctattacttcttcatatttcataatacttccaaaatcttttgcatgttcatacatagtattggcaagttctggccctgttatgctgcgaaaaccaggataattttccacttcatttgtagtaactatctggccaccttcatattgtttttcaagcattaatgcatctaatccagctctacctgcatataatgctgctgtaagggcagctggtcctcctccaattataataatatctttcatattaccaacacctctcctactaatcatttttatattctttgataatatataatttataaaaattccaataagttgttctaaatttaataatttaatttaattttattcaattaaattttattacactttattttataatattatattagctttaataatataattagtcaactat

SEQ ID NO: 144 - DNA, 11622 bp, Clostridium beijerinckii
aatatagattgaggtatgagaaacaaaattcatggattactatttttaataattataacttaaattatatattataaggagagagcgtttatggaaaattttaattattcaatacctactaaagtttattttggaaaagggcaaatcaaaaatcttgctgccataattaaagaatatggtaataaaatacttatagcatatggcggaggaagtattaagaaaattgggttatacgatgaaatgattaaaatattaaatgataattcaatatcatatgttgaattgtcaggaatagagccaaatccaagaattgaaacagtaagaaaaggaattaaaatttgtaaggaaaataatgttgaagtagttcttgctgtaggaggcggaagtacaatagattgtgcgaaagttattgcggcaggagtaaaatacgaagtagatccatgggatttagtaactagtccacaaaaaattaatgaagtattgcctatagtaacaatattaacactatcagcgactggttctgagatggatccacatgctgtgatttctgatatgacaactaatcaaaaattgggtacaggtcatgaaaatatgaaaccaaaagcttcaattttagatcctgagtatacttattcagttcctaaaaatcaaactgcagctggaactgctgatattatgagtcatatatttgaaacttattttaatcatacaaagggtgtggatatccaagatagtacagccgaaggattacttagagcttgcataaaatatggtaagattgcaatagagaatccaaaggattacgatgcaagagcaaatttaatgtgggcttcaagctgggctattaatggcttgatttcatatggaacaaattcaccttgggtggtacatccaatggagcatgaattgagtgctttttatgatataacacatggggttggattggctatattaacacctcattggatgaaatattctttagacgatactactgtttttaagtttgctcaatatggaataaatgtttggggaatagataaaaacttagataagtttgaaatagcaaataaagcaatagaaaagacatctgaattctttaaggaattgggtataccaagtactttaagggaagttggcattaaagaagataagttagaattaatggcaaaaaaggctatgaatccatattttaagtatgcttttaagccattagatgaaaatgatatattaaagatttttaaagcagcactttagcaaataccacagtgtacgcttgtgtaagaaaagtctaaatatattagattaatagcgtacaaattttatgaaaattatatactaaaatattaacggcagtatacttactgccgttaatactatataaatttagagggagataatgtttatggaattatttagtaaaggtgataaagtaggaattgttgcttgttcaaatggcttagataaaagtaatatattaaagatgaacgagctaggacaagcattgaaagaattaggacttatacctgtatttagtgataatttatataaaaattattctgtatttaatgggagtaataaagaaaaagctgaaatattaatgaatttttttatagataatgatattaaggggatttttgatgtatccggtggagacttagctaatggcatattggatcatttgaattttgaaacgataagaaataatatgaaaccattttttgggtatagtgatttgtctgtagttattaatgctatatattctcaaacaaatatgaagacttatttatatcaaataaggaatttaattggtgatagaagagaagttcaagtggaagaatttaaaaatacatttatggataatggaagtaaacttttaacatttaattatgaatgggtgcaaggatgtgctatggaaggaattgtggtaggaggaaatcttcgatgtttattaaaactggcaggtacaaaatatatgccagattttaaagataaaattattttcttagaaagtttaggtggtgacgttccaaagatgttcacgtatttgacacaatataaacaactgggagtatttgaacaagttaaaggaataattcttggtgaattcagtgaaatggaaagagaaaaacacgttccaaacattttggaaattactaaagagatagtaggaaattctaatattccaattataaaaactagtgaaattggtcatagcaaaagttcaaaatgcataataattggaggaaaaataaaactatagtttatatgaaaaaccatgtgcgagtagaagtgattcttttatatacatggtttttacattattttatggaatttatatgaattttaacctataattatatagtacataatgaaaatattataatgggaggggaaaatgttaaaaaactttaggacattatctataacaatagttatgttattaataaattctattgcttttacaggatgtaaaattgatacaagagataattatggtctggataaggacaatcctgttgcagtggaagtatggcattattataatggaatacaaaaaatacagtttgataaaatggtagaggaatttaataaaagcgtaggtaaagacaaaggaataattgttgaggcatttaatcaaggaagcgtaagtgaacttacggataaggtcattgatatcacaaagaaaaaagttggagcagaaaaaatgccagatgcttttatggcatatccagatacagcttatgagatagagaagttaggacttttatcagactttggcaaatatatgtcagagaatgaaataaataaatatatagacagttacataaatgaaggaaaattggatactgaagataagctaactatatttccattagctaaatctacagaaattttaatagtaaacaaaacagattgggaaacgttttccgaagaaacaaatgcagatataagtgagtttaatacttgggaagggatcgcaaatttagctaaaaaatactatgattggactgatagaaaaacagaagctaaagatgacgggaaaacttttttcggaagagatgctatggcaaattacatgataattggaagtcaagaattgggtgaggagatattcaaggttactaatggcaagctagaggttaatattaatgaaaaggttatgagaaagctatgggataatttttatgtgccatatataaatggatattacggagcatatggcagatttcgttctgatgatgcaaaggtaggaaatataatcgcattagtaggatctacgtctggagcagggtattttccagattcagttataacaaatgatgatcaaaactataaaattgaatctatgattttaccgcttcctaagtttaaagattcaaaagttgcgtatatgccacagcaagctgcaggtatggtcatgattaaatctgactctagacatgaatatgcagttacagaatttttgaagtggtttacagagtctgatagaaatgctaagttttcaatagcagctggatatttacctgttaagaaagaagcaaatcatagtgaatttattgaggggaaaattaataataacgatgttttggatgtccccaaaaagtcacaagaagctgttttagaagctatagatcaggaaagaacatacaagttttatgcaagtaaagcttttaatggcgcagatgaagcaagagatattttagaaaaatctatgctggaaaaagcaaaaatagatagagaaaaagttaaatctttgttgaaaaaaggaatttctagagaagaagctataaagagttttaacacagatgataattttaataattggcttgaagatttaagaaaaagcattaatgcagttacttaatttgatttgtaattcataaaattacaaaggttcaaagtcactgcgagcggggtgaaataatgttcttaataaaaaataagaactctataattagaaagttacttattccaatggtaattgttgtattagcacaagtagtgctttttgtaagtgtggttctattgagtggaattgttgggattcttaaaaataattcatttaatttgttaaaccagaaaattcaatcaagaggtagttacattcaaaatgagatgattcaacattggagtaatgttagtgaatctgaaagcttgattaatgctaatattttgcacaagcttcatagtaatgggattacggtaaaggatttggacagcaacacacaattcactaaagagttattggaagatgtttcgagtgatttgatatttatgctcagaaagaattatgtaactggagcatttttaatacttgataataattctgaagaaaaagtaggattatattttagagatttagatcctaattcaaatccaagtgataaatcagatttattgatggaaagaggtcctgcttccattgcacaaaatttggggattcctttagatacatggtggaataacaggtttatatttaatcagaataagaattcatctccagaagaatttttttcaaagcctatcaacgcagctgtagataataaaggattatcttataaggatttaggatattggagtaaaccattttcattaagtgataaagatatacaaattgttacttattcagttccgttgttagatgaaaatggcaaaccatacggagttcttggaattgctatttcattaaattatttaaattcattactttcatatgatgaaatagactctaatgggagaggtgtttatctagtaggcgttgacgataacaagaatatgaactttgaaaagattacaacaacaggaccattagcaggaaaaatacttggagaagaaaaaaatattcagtttaataaaaaagaaatatatgattcaatatatgagataaaagaaccagattcaaaaaatatagcttatgcatcaacaaaatatattaatttatataatacaaatacaccatttgaaaaatatacttgggcaattattggaataatagaaaaggataatcttctatattattcagagagatttgaaaggcttctatcggtatcattaattatttcgactctggggggaataatagtaattgttattgtaggtgaaagggttacgaagccaataagaaatttagctcaggatgttagagaaagtaatcctagtaaaccaatagaacttgggaaaataagtatctcagaaatcgatgagttgtcatcagcaataatgacgttaagttctaacgtggcagactctgcttcgaaaatgtctcaaattataaaattattcaatatgcccataggcgcttttgaatataaaataggacatgaagtagtgctatgtacagacacattttttgatgtaataggaattgaaaaatcaaagcgatttgattcatacgtagataaaagatattttagtaaaattataaagaagataacagaggagaaagaaagttttcaagaagaaacttataggattaaaggagcgaataaagaaactaagtggattaagttaaaaattttagaggaagagtctagaactctaggagtagtaagtgatattacacaagaaattttagaaaagcaaaaaatagagtatgaaagagattatgatatacttactaatatgttaaatagaagagcatttcataatacagtaaaagaaatattagaaagcgaggatcttaaagtaggagcatttataatgtgggatttagataacttgaaatatgtaaatgatacttatggacatgattatggcgatgaatacataagaaaagcatccgaaatattaaaggaatttgagaaatatggaggagttgttggaagaagatcaggggatgagttctatacatttttatacggatatgaagataagtacgaaattagaaaaattgtaaaaagtattcattctggtatcgagaattcagtacttaagttacctaataatagagaattgaaagttagaatatcaacagggatagcatggtatccacatgatgctataacttttaaggatttagctaaatattcagatttcgcaatgtataaaattaagaaaacagtaaaaggaaatataagtgagtttaacaaagaagaatatactgaggattctttcttgttcagcagtcaagaagatttaaataaattacttgatgaaaaacttattaagtatgcatttcagccaataatagatgcaagaacaggaaaaatatttgcgtatgaagctcttatgcgttcacagttagagtcccttaaaaatccgcttcatataataaagcttgcaactgctgattcacgattatatgaaatagagaaaattacattttttaaagctcttgagagctttgtaaggaataaagaggaattcaaggatgctaaactttttataaattctttgccaaactatgtcttatcatatgaggataggaagaggtttgaagaattgtatggagaacatcttgatagattagtaatagaactacttgaaaatgaacgctctaatggagataacatttctataaaaagaaaagtaattgaaaagtggaatgccaaacttgctattgatgattttggctcaggatataataatgaagcagtattgttagcaattacaccagattatgttaaaatagatatggaaattgtaagaggaattgataaagatttaaataggcagcagatttcaaaaaacctcatatcttatgctaaacaaagaaaaattaaagttgtagctgaaggggttgaaacaagagaagaattaacgaaacttatagaatttggagttgactatctccaaggatattattttagcaaaccagaatttactccacctgagataagtaaagactcagttatggatattctggaaatcaataaagaatttaacacaaaataaaaccaagtcatattttgggggatagatacgaatggaaaaagaagtaggcgctaaagttgttaatgggaaaataataatagctgatgggataaatggggaaattataactataaaagctaaagaaaatgtaaatctatttattaatgatgtagaatgtgaaaagtttaaaccatatgaagtaagttcaaaagataagattacttataattgcgagacaactcctgcaaagagagaagtaaatataactatatctgaagataaaatgaaagcttatatgacagtggagtatatacctaagactgaatacaaaataaaggacagggaattttacataaatttagctgtatctactgaagttctgttgaaagaagaacctgaatactttactgttcaagagttatataaaaaactaaaagaaaaaggaatagtttttggaataaaggaagaatctttagaattgatcttaaaagggtgctcgagtgaagttttggtcgcagaaggattggagccagttaaggatacaccgagtgaggtaaagttgttttttacaccaactcaaatggtttttccagaaccagattctaatgagaaagtagactttaaaaatttatttagaatttccaatgttaatgctggagataaaatcgcagaaataatccctgagattccgggaaagaatggaatgaatattttgggtaaagttatagagcgtgaatatattcgaagcttaccaattgatgcatcaaaaggatgtaagattgaaaataatcatattatatctcttattgatggaaaagcacatattgctaatagaagtgtaagcgtaaatcctatttacaccgtagaatcagtaaatatggaaacttgcaacattaaattttatggagatgtagaagtttatgatagcgtacaggataatatgtttattagcgctggaggttcattagatgtaagtcaaaatgttaatatggctaatgttgttacaggtggagaaataacaatcttaggaaacacaattaattcaaagatattatcaggacaagtagatataagaaaaaaagaatattcagatgtacttactgaatttaaaaatattttagttagtatgatagagtatattaacggattgaatctacaaaattttgaaagaaaagattttgtaaagacactgactgagaagaattttgggaattttcaaaaagtagcattaaatataatttctttaaatataaaaaataaaacaaaacgcagcaaacttgtagattttataaaaggaaagatattaggacttaatatcttggaaataaagtcaatttatgatctaaaaactttacttaacatattggataatgaaatagattattatgataagaatataatagtccccctagatattcggattggttattgtcaagaatgcgagataaaatctacaggaaatattatcataggtggtaaaggtgaatatacttcaaagttaactgcaatgaaggatataatttttacaagatctgattcggtggccagagggggagtcttatctgccggtcaaaatataagtttaggagtagtagggagcagagcatatatacctacaacgttaatggtaccacagtatgggagaataactgctgctaaagcatatacaaacacagtattttgctttggtaggacaaaggttacattggatgaagatctgaaaaatattaatgtatattttaatagtgagaaaagggcaattgaatttggtaaaacggcactgtaaaactacctactctaaaaatataaaaaatatagggtatgatggttcgaaagaatatgtttgttttaaaagaatttttggagaaaattaaagaattataaaaataataagtaagtatttgtctaaaaaatatatatgtgatataataagtcaacagttcatacaaaagactcgtatatttccgatattatggttggaaagtctctacctgctatccgtaaattagcagactacgaggtagtgttttagtgctaagtattattatattcgcatataaatacaacacctcagctttaagatggggtgttgtatttttttgaaaacttttctgaatatatgtataaagaatttgcgtgtctatgtatgattaaattttacatagggagattgaaagaaaatggaattaagtaacaaagagattttaatcgaagatttggactgtaaaaatgaagaaattagcgagcttctttatggagttgaagacaagcctaatttatctacacaaattttgctaggatttcagcacatatttgctgcgtttggaggaattatagtagttccattagttatttctagtgcattaggttttgatatagttacatcaacagcacttatgagtgcaactatattgtcagctgggatagcaacttttattcaatcgaaaggtattggtcctgttggtgcaagagttgcatgtataatgggaacagattttacatttgtagcaccatcaattgcaattgggagtatttacggacttccaggaatattaggtgggacaatacttgggtcattagtcggaataggtttaagctttgtaatacgacctatgatgaaattatttccaccacttgttacaggaacagtgataacattgataggactaactctattacctgtatcgatggattgggctgctggtggtagtggttcgcctaattatggaaacttaactaatatttcaattgctatgattgtaatgattataactttattgttaaacagatatggaaagggattagtaagcagtgcctcaatattaattggaatggcaattggatacattgtttgtattcctcttggaatggttgatttttcatcagtaagttcagcgagttttatatcatttccaaagatatttgagcatggagttaattttgatcctaaattagtacttccatttattcctgcttattttgttacaacaattggaacagtaggatgtttaaaagctattggagaagtttcaaaggttgaaatgggcgataagagaattggagcaggagtattatctgatggacttggaagcatgcttgcaggtattcttggaactttccctaatacatgtttcagtcaaaatgtaggtttaattccgttaacaaaagtagcaagtaaatatgtggctatgatggctggaataatactcgtaatactagggtttttaccaaaatttgcagcactaataaatataatgcctcaaccagttttgggtggagtaggtattgtaatgtttggtacagttgcggcatcgggtattaagactttaagcagagtcgaattaaataaccgtaatttattaataatagcaacagcaattggacttggtgttggaattacattccgtcctgagtttataagtcaattaccagaaggtcttaaaatgattttctcatcaggtatttcgactggaactattgcagcgctaatattaaatttattattaaaacaagaaaagagtggagtagaatagaatggaaagcttacataaaagaattttagaagaaggacaagcaatgtcagaaaatgtactgaaagttgattcatttttaaatcatcaagtggatccggaattaatgtacgaaatgggtacatactttaaaaattactttgagaatcataaaataacaaaggtgtttacaattgaaagttctggtatagcacctgctgtgatgactgcaatgcaaatgaatttgcctatggttactctaaaaaagcaaaactcaaaaatactgaatggtgatgtttatcaaacaactgtacattcatttactaaaagtttagattatgagttgacattatctaaaaaatatataaatgatgaagataatatattagttatagatgattttttagcaaatggcgaagcggcacttggggctgcacgtttgatagaagaagctggagcaaaagtagcaggaataggaatagtaatagaaaagtcatttcaaaaaggtgctcaaatgcttaaggataaaggatatgatgtatactctttggcaagaatagcgaaactatcaaaaggtataatagaatttgctaaataaagtatttttattacaaagtaaaaattaaattatatttattatagatacccaactttaaaactagatttatgtgataacttaccgaaatcataaatattttgattccgaaaagctatgaaaatatcgctgaagattctaagcagcaggtgtatccactttagcatgctccaactttcagtttgacaagctaaaatggaacaacctacagctaagaacctttaacagctcattttcaaatgttttctccgcaaatatatttataatttctagtgaagatataaacttaaagttttagcaattttgtaaatatgttaatcaataagtcgaatttttaaattgtttatctatagcattttaaagagtgtctaataaagatcttataaattagagttgttcaattttgcataatacaagcaaagttgaacaacttttaatattttacagagcatttaaattatctaatagtcattgggagtgtcgcaaaatgattaaattttaatcaggagcgatgctcattttcggtttaagccagcaaatctccaaatatttgaaatacaatattaattatttaaagaattctgatttttaagcacactaaaataagcctagttaatttattccataattaggcagtaggtttca

SEQ ID NO: 145 - DNA, 11618 bp, Clostridium beijerinckii
taaccataacaaatttgagtctatttttctatattttttcacttaataagtgaagttttgaatttgttaagaacagcttaacgagccatgcaaagcatgtttcatataattttatgaataattcaggttaataccagattaatgtttattttatcatatttttaacataaataattatttacagttgataaattcttcttcaaaataactttttaatattagtaacaaagctatttattgtgtccaaaatagtttttgctaataactgtatccgcaattctaaaagaaaataattccattattaacttgatacgcgttcttcaccagtatatactattaataatgctatttaatatattataaacctataagttacttatgtttatgaatatttatttagccataatactctatatacagaaaggttctgaaatataatgatttcaactaaagacaattcttctttgcttaaaaacaaatcattaagactattaatgacagcacgtgtatccactaatttcgcatatcaaatgattacagttgctattggatggcaaatgtattccttaactcattcagcattttatctaggtcttgttggactagttcagtttttaccaatgctttttctctccctttttgttggacacatatcagatagatatgatcgcagaaaaatagtaaccttaagtcaagtaactcaaagtgtgtttatttttattatggcttttgggaattataatgagttaattactaaagagcgatttttaattctcattttctttatagcggtagctcattcttttgaaggtccaccaatgcaagccttattgcctaatatcgttagtaaggagattttcccgcgagcttctgctttaatgtcttcagtttcagaatttgcagttattataggaccagctgttggcggaattttatatacgtttggcacaacactagtttttttattaactggtatcttatatttaatatcaggtattcttatatatcatatttcaattgagaaagaaatttttaaatctgagccaactagcataaaatctttattcgcaggaatatcttttataaagagtagacctataatacttggagcaatatcactagatttatttgcagtattatttggtggcgcaactgccttacttccaatatacgcaagtagcattctaatgataggttcttttggtttaggcatactaagatctgctcctgccgttggagcattattaatgtctgcttatcttgcaaggaaaccattaaagcacaatgtagggaagacaatgttcatagctgttatattcttcggtttatctactatagcttttgcaatatctagatctgttataatatctttcattgctcttttgattttaggtgcttccgatgtaattagcgttgttatacgatctacgcttgttcaacttaatactccagattatatgagaggaagagttagctctgtaaatatgatattcataggaacttctaatcagcttggtgaatttgaatcaggaattacagcgtctttattcgggactgttcccgctgctcttattggaggcattggaactatagcagttgtaatgttatggatgaaattattttcttctatattgcatgttgatagatttgaagcaagcaaaaactaaaaatgtatttttagttcatgaattttttaattaaatattttaaataaaaaaactttaaatagtattatagtaaccatttaaagttttttactttgtaataataaatgcgctacaccatttataatagtctaactattccccatttttatagaaaccctatttctccctaaactcttcgcttcatacaaagctttatctgcaaatttaatcatattttccaaatctcgttctctaactgatgtaaatatcccaaaagaagatgttatctttatgcatttattgtcatggagtatttccaaattttcaatccttcttcttattgtttcaccaatctctaaagctttttctgaattagcattatctagtagaattaaaaattcctctcccccatatcttcctatataatatttttttcccaataattctttacaaatattcattaccttttttagaacaatatcacctgtaggatgcccataagtatcattaataattttaaatttatctatatccatcattaatagagacatatgtttcttatccgaacaagcttcaattttttcttttgcaattttatagaaatactttctattatatacccctgtcaaaacgtcagtgatgccatagtactcaagtttcttaatcattaaaacctgttcagtattatcactcaaaacaataactttacccttccctctgttattattaattagtgtaagctttcctttaaaataatagagtttgttcttgattttaatttcacagttgaaactcgtttctttttcttcatatatatatttgataatttcctgatactctttaaactctgtgcatacgtcttgtcctattgctagctttgattttatattaaaaattttctctgctatattattcatatctattattttgttttcttggtctaatactaatattgcttcagaaatattgtcaaaaacaacatgtctagcaatagtagctgtttcaaagatatttgatttaaacaaagcgtatgtatatatcaaacaaaatactcccataaaaattggaactatatctattcttatagacgtaatccttgacatgtatatccaatatccaatccaaggaataaatgatgtaagcatgattttaaagcttctctttttatataaactgttttcttttctataaaaaattaaatacaggctattccctactatgaagcatacatttacaaaaattacgcatataacatatacaatgcctggtttaagatttgcaatatatagattatctgcaatgtcaactgtgtaacttttataaaaaagatgatgatagtcattagtaatatttaatgccactaataccataggcaacgaaaatagcaacatatagagctttttagtaatatacctacttttattagtatattctagggccatgatgacccaaaaagccggaatggatgctattcctatatactctattccagtaaacaatttcataaaggttaaattaggacatattaactcaaaagaataaaataaactatatataaaaacacataaaataacacctaaaagaccgtttaaatgtattcttctttttttataaaataaaaatatgcataattgcgccgaaacaaatgccgttaaaaacattgcaagaaatattatataattaaacatctaatatcctctttcataatcactaattctttaataaattattatcctaaagccaactttaacttttggaatcagaaacctattctatcattatatattataaaacccacgttattccatttcaataactattacaatatatttctgtaattaaagatttctttatcaatttttactcgaatcaacgtgattttgtgaaacttttaattaacgaaaaaaaatcaagtagctacaacagctacttgattttttttaaattcaaaatttaatcctattcccacaatgaggacaaaattgaaaacttgggtcaacttccataccacagttcctgcatataccactattataattatctctataattactgctttctagctcatcaagatcccaataagttatattcacaggttcgttattctcaatggcttttcctttgtctactgaaatactaaagttagctccacatccatcacatattatataatattttatattccacctaaaaagcggaataaagaaaaaatgaaaataattaaaattttttatcagctttccacgaaaaactttattacattttttacagtttaaattgtctaaaatctttatttctttatttttattttcaatgccaaatatacctataaaaaacatacaaccatttacctctatctataaatattattatcatatatatctgtaaatactaagtatacatttagaatccttataaatcaagttatacaattagggccacaatattggaacttaattgtaacatacattatccattttattaaagtattcacatttttaattctattcaggctttattgtatctagataagtaaacttgccatctttaactatcttcaaaacagcttcttttactgcattattgttttcatcaattgttattactcctgctgcaccaggaaaatcttttgtttttgctatttcatctctaattttaactggatctgcagaattagctctcttaatcgcatctaaaattactagatatgcatcataccctaatgctgtagctgctgctggctccttattatattgttttctatattcatcaagaaaaattttagattcttcagttataggtgtctcagttgcaaaaaatgttgaaaatacagttccttcaacatcctctttacctatatctaaaaattccggtgtctcccaggtatcagctccaattattggtgctgtaattccaagttgccttgcctgctttattatcattgctccttcagtaaaattccctggagcaaatattacatcaggattgcttcctttaatatttgtaagctgtgctgagaaatcctgatctcctgtgttataatttgcttttgctacaacagcattattatcctcagttagctttttaaattcatcagtaaagaatttgcagattccaactgagtaatcacttgagacctcttgaagaattgctacctttttagcctttaacttattagctgcgtattttgccataacagttccttgaaaaggatcaataaagcaaactctaaagtaataatcatttcctgcggttactaaagggtttgtacaagttacccctacagctggaaccttagcttcctgtactatatcacctgctgccatagaaaaaccacttccatagcttcctataatagcattaacatgctcctgctcaataaggtttgcagctgcattagctgcttcaactttatcagatttattatctgcaaaaaccagttcaacttttttaccaagaacagttggataaatcttgtttgcaagttttgcaccttctgtttctaattgtccacctgctgcatttgcacctgtcattggttcaaacacacctatttttattacatcactatcctcattggcttttgtgcctgattttgaattacaacctcctaaagtaaaagaagtcatcatagctataaccaaaagcaatgaaatttttcttttcatatatatatccccctaatatctaagtattaatttaatcttattgacgtacaaaataagagcaacaaaatagtaactcaaaaaattctaatatcccagcatttatttcttataatatacatctcttagttcaattaaaattatctttttctaaaaacttatattttaatttaatgtattgtaataataaaggcaaaataaattccttaaataaaaaaataacaagtcagtatttttctattttctgacttgctatttctcctctaaatacgaaaattctcatattacaaagcttcaccaagataagcttttttaatttcatcattagaaagtaattcttgccctgagccacttagtgttattcttccagtttccataatatagccaatatcagctatttttaaagctgcatttgcattttgctcaattagtagaactgtcatgccttcttcattaattttctttataattccaaataattcttttacgattattggtgcaagtcctaaagaaggctcatccatcattattaactttggtcttgacataagtgctcttcctattgcaagcatttgttgctcacctcctgaaagagttcccgataattgccaagttctctccttaagtcttggaaaaagtgaatataccttttccaagtcttcttgaatacctgatttatcctttcttgtataagcgcctatttttaaattttccagtactgtaagatctgaaaaaacttttcttccttctggaactaatgctattccttttttcaccataagttctgtattaagcttagttaaatcagttccatcatccaaattcatagttccactctttggtttaactagacctactatagattttaatgtagtactttttcctgctccgttagcaccaactaaagttacgatcttcccctctggtacctctaagcttattccttttaacgcttcaattccaccataggcgactactaaattatcaattttaatcatcttcagctacccccaaatatgcatctataacctttttatcgttttgtatttcagaaggtgtaccttcagctatagtaattccatattcaaaaacctgtattctatctgataatcccataaccatattcatatgatgctctatcataaatatagttaaatcaaatttatccttaatttctctaacaaaatctgtaagttcatcagtttctgtgggattcattcctgctgctggttcatcaagaagaagaagcttcggattagtagcaagcgctcttgctatttcaagttttctctgcataccgtatggaagagaacttgctttctcattttttaacttttcaagacctacttcttttaaaagctctaaagatttctcaaccatttctttttcttctcttttatatctaggaagctttaacatcgcttcaatgcagtttgacttaatatgaacatgatttcctattaaaacattgtcaagtacactcaaatctttaaaaagtcttatgttttgaaatgttcttgctataccagtttgagttattttatcttgtctcattccagtaatattagtatcattaaagattatttttcctcttgtaggagtatacacattagtgatcatattaaaggctgtagttttaccagccccattaggtccaattaaggaaattatttctccttgattaatttgaaggttaaagtcttttacagccgtaagtcctccaaactgcatagtcgcattttgtacgtttaatagtgccattacttgtcccctccttcttctagaggtttgttattagaatatttaaatattgatttccacgaaaattcttttgtgcccattattccatgtctaaagaataatactattatcataagcaaaattgagaaaataaccattctaagtcctggtatccctgaaaaactaaagattcctaaatcaaattgcttttccatatccaaaaatcttaaagcttctccaagtattgttacgatgaaagctgatataactgttcctgtaacgcttcccattcctccaataactattataaggagtatattgaacgtaaggctgaacttaaacatattaggatcaattgttcccattaagttcccaagtaatccacctccaactccggcaaaaaaagcaccaatagcgaatcctattactttgtgtttgaataaacttatccccatactttcagctgcaatctcatcttctctaattgattttagagctcttccatatgaactatttataagcgacagcaatattattattgtcacaattgctactccaaagctccaatataggtttgtcatatgaggaataccacgaagacccaaagctccattggttagaccttgtatattagtaataactattcttataatttctgcaaatcctaaagtaacaatagccaaatagtcacccttaagccttaaagccggagcacctattaaaactgctataaatgcggataaaagaccagctattaacaatgctacaataaacggtaccgatatatgattaaaaggcgccattaatggttccataaagaaattttgatttttaactttttcactcattgtaagcaatgcagttgtataagcacctaccgctacaaagcctgcatgtcctaatgaaaacaatcctgtaaatccatttattagatttaagcttaatccaagaactgtatatattgcacataaatttaaaattctaattttataagagtctaagctattatttgcaacaaataagagtaaaaatacaattgcaataagagctatatttaaaaatttatttttattgttcatttttacaccttctctgttaaattttttcccattattcctgtaggcttaaatagcaatattacgattaatagtataaatgctaaagcatccctataccctgtaagtccagggaaaaatccaattaacataatttcagctagtccaagtataaaaccaccaataactgctcccttaatatctcctataccaccaattacagcggctataaaacatttaagacctggcatcattcccataagtgcaactatttgtggatatttcacacaccacatcatagaacctactgcagctaatcccgatccaatagcgaaagtaaatgatattgtcttatttacatttatccccataagtcttgcagtttcaacatcttttgaagctgctctcattgccataccaatattcgtattattaactaagtgtaataaaacaaatagtattactattgtaacaactggaattataaaagtaagtctttgaattgaaattccacctataactattacatctgtaaatagcttcacatctggaaatgctttaggtcttcctccaaataaaacaaccgctaaattttcaagtaagaaggatacaccaatagctgaaatcaaagctgaaatcttaggtgcatttcttaacggtctataagcagtgaattcaattcccattccaaggaatgctgttataaccactgcgattataaaagcaaagtaccaaggtagtccaaatgttgcaactccgaaaaatccgaaatatgcagccatcataaatatatctccatgcgcaaaatttataagttttaatattccatagaccatagtatatcctatggctataagtgcgtataaacttcctagtgagataccatttgctaaattttgcataaatgtgcttaaattcattaaagtcatattttcacccctaattaattttcttcaggttttattgtatcaagataagtaaatttaccatctttaactatctttaaaactgcatcttttactgcattgttattttgatctatagttattactcctgcagcaccaggaaaattcttggtttttgcaatttcatctctaatctttactggatctatcgaattagctctcttaattgcatctaaaattactagatatgcatcatatgataaagctgaaaccgctgctggttctttattatattcttttctatattcatcaagaaagacttttgattcgttagttataggagtctcacttgcaaaaaaagtagaaaatactgttccatcaacatcttctttacctatatctaaaaattctggagtttcccaagtatctcctccaattattggagtagttattccaagctgtcttgcttgttttattatcatagctccttctgtaaaattacctggagcaaaaatcacatctggattactgctctttatatttgttagttgagctgtaaaatcctgatcacctgtattatagttagctttagctataattgcatctttatctcctgtaatctttataaattcatcagtaaagaacttacaaattccaactgagtaatcacttgaaacctcttgaagtaaagctacttttttagcttgcaatttatttgctgcatattttgccataacagttccttgaaaaggatctataaaacaaactctaaagtaataatcattaccagctgttacaagaggatttgtagctgaggctgcaactgctggaaccttggcatcttgtacaacatctcctgccgccatagaatttccacttccccagcttcctataattgcattaacttgttcctgctccacaagattagatgctgcactagccgcttcaactttgtctgatttattatctgcaaaaaccagttcaacttttttaccattaactgttggatagagcttgttcgcaagttttacgccttctacttctagctgtcccccagctgcgttagcaccagtcattggctcaaatacaccaatttttataacatcgctgtctatatttgctttagtatttgattttgaacatcccgccagcgtaaatgtagttgtcatagccagcgccaaaatcaaagaaatttttttcttcataaaataagccccctagtattagttttattttctcaaggtgtactctgcaaaaaaataataatttgataataagatttacaaaaaacatagaaaataattaaccagctattcattgtttaaatattactattctttttaatatttctattgaaattgtttatataaagtaatccttaaagtataaatttattaatttattaatttattccgacgattattaacaaattatatattatcctatatccgcccatctgtcaacccacgaaagacatttgtattctctacaaatataaatattagaactatattatcaaaaaacgttcgttatgtagaaatgttatgatagtttttacaagttaatttataaatttatatatatcagttatgtatttcctagtctctatctcttttaattaattctagaaagatattttcactttacttttcagaatatgcttaattgatttatatacagtattttaacgttgtttacctttggcttattaaaccttataaaaatacaaaaaagcttaatgttactaaaatataacattaagcttttttatctatacaattttcttatagactaaaatcctgctggctctgatttagcaccagcttcatgcatttctttgattgcttctacatacatgcttttatcttctacaatcttagcagcttgctcatagcaatataatgctttatttaaatcttcaagatgataataacatgcagctaatctattgattaaatcaggatttttcctgtttatttttagtgccattttataatatcttaccgcacttttatagttcatactatatttatctctctcattaaattctactatattttctttacttaaatatatatttcctatacactcataagttgcacagattaataatttatgatcttccttttcattttttgagatgttcttttcgccttttctaagatgatctaatgcattttctatgtttcctaattctgcatacgaaagtcccatatatatgtgggttaatgaatcatcagagtctttacaatatacattaaatgcttcaatcgcatcttcatttttccctaactttctacatactagaccttttataaaatatgaataataattttctttattaaattcagctgctttttctgtgaaatataatgccttatctagctttccttttttaaaatctcccattgcaagatcatttaaaactagtgataattgcttttcacttgttatagttccacctttaacatttatcctattctcttctaaaaaactttttattttgtcttgtatattttgattatcttccattttgttcctcactttttatctttattttaataacaaatgccaaaaatgttaatattaattctagcatttttattt

SEQ ID NO: 146 - DNA, 11591 bp, Clostridium beijerinckii
atttagtactataaaattattataatgaaacatatttaataatcaatctatatttattgagaggagaaatttgttcgatggaatttaatttaaatgaaggtacttcatatatcaaagagtttaaagttacagaaaatgaaacagctataaaaatgggatcaggtgatctagaggtctatgcgacccctgctatgattgctctaatggaaaatgtatcaaaaagtttagtaatagaggaacttccaagtggttatactacagtgggaattgacatgagtgtcaaacatattaaatcatctccaattggcgcaaatataaaatgcaaatctacccttacaaaagtagatggaaaaaaattattttttgatgtggaagcaagtgatgaccaaggtactatcggaaaaggttctcatataaggtttattgtaaactcagaagattttatgagaaaaactaaaaattgctaaataaatgataataactatatttaaagagattctctctttaaatatagttattgctttaagattgatttaaattggacttactccgatacttttccacaaatatttaaaattagttttgaataataaatttatatcgatattttgattcattgcccaaaggaccatagaactttgcaacatcgacacaatactctttgatgtagatagagaatcaatttctggcaaaacctcacctaattcttttccttcttctacaacattgtctatcccttccaataatctatggttaaaatcatttactaaatttttattttcgtaactttttaatccttcaattgttataaatgtgacagcaatatagttaaatttatttatatttagaatcttttttaaatatggtattattccacaatattttataaaaattgttttcagctttttttttgcggattcattgcataaattggtagcgcctataatttcatcaaagtatggagaacaaaactcttctatcactttatatataagctcatctttacttttaaaatacttataaaaagcacttttatttatgttaatttgtttaaaaatatctctaatagacacttcaaaaaaaccattttccataaatagtttgatagatgactttaaaattttttctttaatttccaccctaaaattctcccttttttatttagcattttccaccattaataaaaaaaacaaactaaatattataatataaacttagtttgtaccattttaatgctgctgaacttttatatatacgttataattctaaaaatattgcaagaatttcagccgtaattgtgaattgcaacatatatattataaataattcatactaatcaccttatttatatggtaattagtatgaatatatttctgaagtctttaactctctaaaatctgaatttgaaattaatatgttcttatttcttaagtattttaaccattaggtttgtaaataagctaatatttatttaagtattataaagtttcttaatgttaattctattttgctcctgaaaatgctatccaaggtttttgaatttcttgctttaatgtgttataagtatcaatttgacttcttaattgaatgtttaaatcttcactactcaaaacttgggtattataagcagattcagttatcattcctaagtcatatttaagttttgcatcactaaggttcttattacttaattctatattttgtttaatataattaatattatcttctgctgtaataagatttgtataaagtgtttttagttggtctttaaactgctttttactctcgtttaaattagtttgattttcatcaatagttagctttgtgcctaggtatgacaaacgtgcaggtaatgcatttgaatatttgctttctgctttatcatatgcttcttttttttcattaattgtttcctgatcagcaggatcagtactatttttaacgtcatcatattcttgttttgcatgagccgcagcttcttccaagtcattaactccactagcacttaactcacttattttatattcatttcctgatacagttatataattatctttatcattataatactcattattaatcttaactaattgttcactgtattttaaataattatctataactttatctaagtaactatctatagatccatctattttaaatgcctcatacggaatatcctgttccaaagcatattgtgttacatccttacctgtcaatactttaaagctatattcagcgtcctttaatgtattttcacttgttttttgtgttatttgtaaattttgaatttcaagttcagttgatttcaaatcacttgatgttaccattcctagactgcttttgagttttgcatcgcttaatgtcttgtttttaatttgtaattctttttcagctttatctatttttatttgacttgtaacaatattgttgtatgctttagtaactttttgaactaaaacatcttgatcaaaatccctttgctgtctagccttatttgcattagcttctctagtatcatcattaaagtcttcttcatccccactaacgtctttagaatcatctaaatcttcatttatgtcattagtcttatcttggtaagttattttactagtatcaagttgtaatatttcgcttatgctgattgcctcttttacagcttcatctaaagtaagtaatggctttccgtttacgatttgtgaatttgttgcagtgcttgtactagtagttgtttgttgagttgaatctgctgcaagtgctggtacaacgctaccactcataacactaatccctattgcaaatgctattatcttatttatattttttctcatgtataaatctcctcttcattaatatttattttaatataaattcgaattctctttttatttactagattatttttctgttatagatttattttactataattttaatgtttagtaaatgtagtaataatttaggatttactccttaaccttgtatttaagctaatacactttatatatggatcatactaaaacttaattttagtatgatcttattaaaattagcaatttctttgttatatgcctacatttgattcgctatcaattggcgttgatttttttctatgaattttttttgcaaatctttttttcaatccatcaagtattgtataaactattggaactacgaataatgttaatattgttgaagtgattaatcctccaattaccgcttgtgccatcggcttacgcatttcagtacctgctcctgtagctaatgctgtaggaatcataccaaatatcattgctaaagtagtcatgattataggacgtaatcttacaagcccagcttctactaaagcctcatttctcggcattccctttttaattctttcctttgcagcatcaataagcaatataccatttttagcaaccagtcccataagcattacaatacctattgctgccatcatgcttaattgacttccaccaacatataatcctattattgctccaatcaatgctagtggtagagcgaacattatagctatagggtcaacgaaactttcaaattgggctgccataactaaatataataaaagaactgataaaactgaattttgcaccaaactaatcatactcttctgcatagttccattcattcctccaacagacaaagaaactcccgccggcaattcactttttatcttagctaaatacttattttgtaaagttccagtagataaacctcttacattacaagaaagttcgacttgtgcctgcttattgtacctatgtaatgttgaagaagttgttccaacaacttttttagttacttcagttagcggaacaagcttattgtttgaacctgaaacgtaaattccatcaagattactaagatttttacgctgctcatcttgaagcaaaactttaacatcatatctatcttttccaccatcatacttagttacagttgaaccattaaataatgtagccaaggtactagctacgtctgaactgttaacacctaaatcagcagctttatcacgatcaacagtcatttttacctctggtgtacctgaattggtattaacaccaacattagtagcatctggatctttagccatctctgctttcatcttttctgcgaaagcttgaacttttgctctatcatcaccaacaagattaatagctacatcttttgaagatccgccaccacctcccatagatgcagctgatgctgtaatatccattccaggcagtatctttagatctgttccaagtttttgcgccatatctctcgagctaatcttacgttgtttcttatctaccaatgtaatattaactgttgctttactattagtaactgttgaatatacatattcaacttctggatttttcttaacaatctcttcaatctgtttagtttccttacttgcagtatctaatgttattcctgaatcaaaattagcattaactgttatttgtcctttatcagttataggtatcattacgaaacctaatgatggaataagtgaaagactagctataaacataactgcgcaaacagccaagactgttatcctcttatgaagaagaaaagctaataaatgtgaatatttctcggcaaaaatgtcgaatttatgattaaaccatccaaaaaacttaccaataaatgttttactttcttttctttctgatctaagcattctagatgacatcattggtacaagggtaaatgatacaaacaatgaaactgccatactaaaaacaattgtaagtgcaaactcaataaagaactttccaattattccagctatcattgccataggcaagaatactgcaataacagctaaagttgttgctattactgcaaatccaatttctgaggtagcatccttagcagcatcaattggatgttttcccatatgaagatgccttacaatgttttctataacaactatagcatcatcaattaaaagccctactgcaagtgataatgccattaaagacatagtatttaatgtaaagtccatctctttcatacaaataaaagtagttattatagatatcggaagagatgatgcacttataagggtactttcccattcatttaagaataaaaatacaataacaactgctaatatacatccttctatgatagtattcataacatcatctactgtatcttttattgatgttgaattatcagtaacaatatcagcatgcataccttctggtaatgaagttttaacttgttctaatgctgctttagcttcttttgcaacttctactgtattagcaccagattgcttaacgatatcaataccaattgacggattaccttgatagtaagcttggcttgttttttcaacaatcccatcttcaactgttgcaatatcttttactctaatctctgttccgtttttgttggacaccaatatattcttaaaatcttctactttttgtattttactatttgttgtaatagatatttggttatctccatcaataactttaccagttgactgatcaatattatcactcttgatactatttattacagcacctgatgtaaggccatattgtaataatttattattatctaactttatatgaatttctcttgtatcctcaccagatacatttacggctccaacacccgataccgcatataactttggctttagagtattatctacaaagtctgtcattttttgattatcagttgaaccataaacagctatggatataattgatgttgccgacatatcaaacttagaaattatcggatcatcagcatcagttggtaatttacctctaacacttgaaatcttatctctaacttcttgtgctgcaacttcaccatttttacttaaatcgaattctataacagtttgtgacatcccagagcttacacttgaagttatattttgaactccagaaatttgctgtactgcatcttctatctgttttgttactttactttctatattttctggtgtagctccgttttctgttactactacggaaacataaggcatatcagcatttggcatatcattaagtgtcaatcccttatagcatacaaatcctaaaatagtaaggacaatcattataactgatataaatacaggtcttttaatactaatatttgctatattcatttattatccctcctacttatttgttgtatcatctgcaccgccatcttgttcagaagctgtgttatctgaagaactatcgtcctttataattgcatctacttcactaccctcttgaagcgtacttatattagtacatattacctgatccccttctttaataccatctgttatttcaacgttattttcattagtttcaccaattgtaattttttgctttttagctattccattatcatttaagaaaacagaataatctccttcgttaccagctaaagcactaattggaacagttataacttgtgctttttcctcgctaataagctgtacctttccaaaaataccaggtaacagtgacttatcgccattatctatttttactttacaattgaatactctagttgtagcatccgctgcagagtccatagcttcaatagtgccatcatatgttttatcatttccatctacggtaattgttgcagcttgacctatttttactccagttattttctcttgtggtacttgtattgttgcatatacagaggatatatcattaacctttgcaagagctgctccctgagatgccatctgtcctacatttaaaactttatcgcttattacgccacttataggagctttaatcactgtgttagctaaatcgctttgagccttttgcaaatttaccttttgtgcttctaaacttgcttttgaactttcaatgcttgcttttgccgattcaatacttgctaatcctgaactataatctgctttagaagtgtttagagctttttcagatgactcaagatctgtttttgatatagcacctccatcaaaaagggtcttttgtctatcataattacgctgtgcatcgtccataagaatttgcaatttctgtagcgttacttgcgatgaatttagttgttgctgcgttgaatttacttgctgctcactaacttctacctgagcttgtgcagtttttatactattttgtatatcttggtcatcaagcgtagctatagtatcaccagcatttacatattgtccattttcaatcgacacagcaacaacctttgctgctatcttactagttactattccttgctgataagcttctagtgttgctttatatgaatcccctaaacttttttcttctgctttagcaatctgtgcttcaacagtggttttactcacagcaacagcagtagtttctgcctttttagctgaaaacaatttggttttagctactgctgcacaacctattacggctataacaattacagcgtatataactattttttttacatttttcatgtttcacactcctaatttgtaaacatatagtttattttgttaatttatatattataaaattaatttttctttgcaccaattccacccataataaaatttatcagcttttcattttcctctcttctttgttctactgaataataattttcatgacaagtccgatgacaatgtaatgccaccattcctcctataacatttgtagcaaaatcaatgtctatgcctgtatccattaccgccccctcttctataccttgctttagaatattgtatgtaatattttttccatttctttttatatcttttataaaatcttcaagatcacgttttgcttcaggatttaattctgaaatctcatttgttatataataacttatccttccagccctttctataacagcatgctcagttaattctataagctttcctagctttttaagaaatgattcttcttgtgatatcttctggtttgcattcatagtgaaatttctatggtcgtactttaaagcttgtacaaataaatcatctttacttctaaagtattcatatattgtacccttacctatctgtgccttgtccgcaatatcctgcatattagttcccgaaaaaccttttttgaaaaatatgtctattgcagcggcaagaatttcattttccttattttttaatcttgccaaaaaaaccacctcacttataaaaatactgtattacaataaattactgactcattatattcacattttatttaaatgaccgaccagacagtcaatgattcacatgcaaataaatcattgaaatattttatatgtacatgaaaataataccacacttttaatttttatactttgtttgtaacctaaaaaatatcttaatttttatgatttacaaaacatatcagcctaaaattatttggattattatttatctatagctatcatttgctacttatgttattttaatatggagtgtatcatagaattattaactgaatttaaacttttctatttatttcaaatttaattattatagtaaatattttatctataattaaatacttgaatttatatatagatatgatacttttaaacatagataaaaaagtagtataattagtgcataaaatggaggtatataaatgtttcatattttgattgtagaagacgacaaagagttaagagaattattttcaactgttttacttaaaaatggctataaaactactagtgcgaaagatggaatcgaagcgcttaatgttttggataaggaatatattgatttaattatttctgatatcatgatgccaaatatggatggttttgaactaataaaatctattcgtgatgctcaatttaatctacctatattaatgattacagctaaggaaagctttcaggataagcaacgtggttttcttcttggaattgatgactacatggttaaaccaattgatgttaacgaaatggtgttaagagtaggtgcattacttagaagagctcagattattagtgaaagaaagcaaatcgttggtgataccatgcttgaatatgattccttgtcagtatatcaaaatggtgaggcaacagtccttccacaaaaggaattttatattctatataagcttatttcatatcctaatcgcatattcacaagacaagaacttatggatgaattttggggacttgattctgaaactgatataagaacagtagatgtacatattaaccgtttgcgtgatcgctttaaaaataacatagattttgatatcttgactgtaagaggactcggatataaggtggtaaaaaattatgaatgataaaccaaatttaaaattaggcttagtcttttcatttattattttttcaataatgtttgtatcatcagtgcttactgcaattttagccataatctttcatccaaatttctcttcggaagctaataagtttctttggccaattattgatctatctataattagtataatagttgggacaaccatatcagctataataggtaaaaaaatattagctccactagtaaaatttagtgaagcaattatggaagtcggaaaaggtaattttaatatcaaattagatgaagataagtattactacgttgaagagctacaaaaaatgtctcagaactttaatattatggtagacgaactaaataacatagaaacttttcgaagtgactttattgctaatgtgtcccatgaatttaagactccccttgcatctattgaaggttacacaactttgctacaggataacaatctaagtaaagaagaaaagtctaaatatacagataaaatactaaataatacaaaaaggctatcaagcttagttggcagcatattacagatctcaagactagaaaatcaagatataatagcagaaagaagcagattcaaattagatgaacaactaagacaaactctattgcttttagaatccaaatggtccaataaaaatattgacttagatatagatttagactcaattacttttcatggaaatgaagaactgttgatgcaagtatggataaacatacttagtaatgcaataaaatttacacctgaaaatggtactattagatgcactttaaagaaagataaaaactggattacaacaagcatttcagataatggcataggcatgaacgaagatacacaaaagcatatctttgataagttttatcaaggcgataaatcacattcttctgaaggcaacggtttgggattagccctagtaaaaagaattgttgacttatgtggtggagaaatagatgtatatagtgaatgtaaaaaaggatctacttttataatcaagttaccatgttaattcttaatttctataaacacaaaaaggctatcttaattaatagatagccttaaattatatctgcttagttttttaaaaaatcccatttagttttataaagttagtctaattttgcttgacgatttctatttttcaacttttatcggtatcataaaaagcattacatgcaattaatactatgcaaaccaaaataactaccgccaacatacttatccctttctaactaaatatataatcctttgtattattatatattaattatgtatatcttgtgcctgtaatcgtttgttgttataaattaaatttataaaccctgttgtagtgtaattatttcacaatcacgaatttatttatcaaacaatatactcttaataactgcaatggattccctagcatatgttgaaggtacaaaataccaaggcatagtgctggaataattatcaaaatttttatacccattcttctttgctaaaatactacttctaaaagcatgaaagtctgttgttactatttttacttttatatcacttattgatttgttactaaattcttcaatcttttctttagaatattttagattttcattagtatctcttgacttatcctctaatattattttgtttttttctattcctttagcctgtaaatattcactcatggcctgtgcctctgatgtactttcatctgtaccttgtcctccggataaaacgatatattgagctaaattttctttcgtacattttatagcaatatcaagtctttcccgaagtattaaattaggaactcctccattatcaagtcctgcgccaagtacaataatataatcgtcactatttcgattatactttggatagtttattattaaagcttctattattataaaacaaataaatatgatgcaagatgatatttttatgtatctaaagatcttataaaaaaacacattctttttcattctctttttagaaaagtagtatactaaaattataattcctaaaactataattggaaaaccaaacgcaatccataattccgataacatatatctaattttcatcaaactcatctcctccagattaatcatctatacataatttagttaatcttaaacttcttataaatattatatctgtaactgagaaagatgaaatacacttatataaatcttataaaatatttaataatatcgtaatattattgtcatatatatcaataatttcatatttagaaattattttcctaaacatatttataattactttataataaaaaatcttcatatactttttatc

SEQ ID NO: 147 - DNA, 11130 bp, Clostridium beijerinckii
tttatacggaggtggtaataatataaataaagtaatttattttacaaaataagaaaattataatttagagattgaataaagagagggatgtgaagggtatggtagaaaatataacacaattattacaagaatataagagtacaaaggaatccttagaatgtgggttgaaatggcttcctaagaatgattatgctaagtctaaaatcgaagttataaatatggtcataagtgatctagaacaattagaacaacaacttagttaataaattaaaagtattaaagtgaaaattataactttaaagtataaaaaaagttattaacatataataaaactgcctcaaaactgtattttgaggcagttttatttttggagtagaatagttattctggatagtattaggagaaaaaacaaaacattgtagtataattaaatggaatttaaagagttttaccataataaatggttaaccatatcataaataagtgaggtttatagtcttagccattgaaataactttgttatggctatttttataggtggaaataccgtaccataagttaatatgctacaataaaaaggaggattggggtgaaaaaataatgagtgagaaagaaaaatcaagatatataaaaaaagaagagcgagacaaagtagataaatcatcaaattttaagtgtgcatggtgtggagttaatttaatggagagacaccatatagtacaatatgcggatgggggaaaaaattgttctgacaatttaatattattatgtcccaattgtcatacattagttcatcaaggaaaaataataaaagaggaactattagaaagaagaaaaaagctatcaggtgaaattgatagaagttctggatatttatctattattaataagtgtaaggtcatgattggtggtaatacatttatagatacacccaatattattaactataatggtgaaaacctaattaagatgaatgtagagaataataatttatacgtatccttgagactatatgataaaaaaagaaatcttatctgctgggtagaagataataagtggtgggttgagaatgaagaaatatttgattttgcttatactaaaaatacatttaaagtagagtatgataaggatattaatattaatattaatattattccagatacagatacaatcgaaataagtggcaatatttatatgaatggttatttgcttagatttgataaagaggatattagatattttgatgaaaaatatcctcaacattatcccatttttaaaggaaatacaattgaaaaatgtaattgtgcattcagatttaatatataaaaaactcacttacaatagatactgtgaaccatatcataaatgagaaattactttatattattaatatcaccattaggctaaataatacgaatttgagacattagacatattaaaatatcctagtaaagcttatttatgccttactaggatattttactgctacctttaaaaatattaaaggtgataaaatttttatgcttaccatagaaaagcattatcacactttttgtattattataattagagtatctttagtttataataattatattcgttgattatttactttaacagatttaatatttcatcctctgaaagtgaagaatcgcagcgaacctctatttctctatttttactaacaataaatcctggtacagttacaatattatatttttctctaaatgaggcaattaaatcatctgaaaaattagaactatctacatagtaaattgttgtgttaattttattagttaagccacttaatttcttagcaaatttacggcaaaatgggcatgttgcacgaccaatatagatagcagctaagtcttcattagataataattcttctgcttgtgtagaaattactttttcaaataactttacattctcttcatagctatctttttcaaacatatgtatcctcctagtttttttataatagtatatcaaagctaaattatttaatcaatctagttagtttttctagtagttattttgtgaaattatagaaaatattataaagaaaattatagaataagatatgtaaatggggggtaaaaatggcttagtatctctttatgtattaaaaaaagaatatttgttcgtataagtagagataaataagtcaatattatagaagaactactaaacgaggtagtaactatgattaaagtattagatccccaaaatgatgtggtttttcaaaagttatttgggatgaaggcacataaaattaataagtttcagcttttttaaagaagcaagatttcttagaattccaataggtatcaaaagataggggatttagcttatttataatttagtaataaacataagataattgttgcttaatagcataaagaataataaaaaaatatatattgcaaaaataagtcttgatcataattctaaaaatatttcaaaaattttagtcgcaattttgcattgtgaattacaacatatatattataaaaaaatgcatgtagaaaattattagtacatgcatttttttacttgaaaaaagtaattaattacttttttcgtaaatacaataacattcaacttagtttaacaaagagcgaattcagtaataaatcagttttattaacatattgattaaatttgggaaatatagtataattatatacaattacatggtttaaaagtaataaattgggttttataagaatttatgaaagctggtatgaaaaatgaactggataataaaatttaatcaattagaaaaagaaaatacagataaaacattggacattttaggaaaatatgataagtacaagtatgagctactggatgaagtgtatataaaagctcacaacttgaaatactcaattggtaaattaatagataaattaaatataaatgctattgtaggtgatccattaaaagaagaagtagaaaaactggttaaagagtatattcaaatgaaagatgattatgaaaatagcagagataagatgaaagaatatatgtacgtttgtggaagtgaagcagcacagctaaaatgtaccatgattcaaattgtaagtagatttataagtgcaaagaaagatcttcttatgtttaatagaagaatggatgcatttactaaaaagcttattaatatgtattctgaatttgatatgggatccatgggtgaaattgaggtattgcaagatgtttattgggatcttatgacaattaaagatataattgatacaagaaataaagagtatgatgagagagtagaattattagaaaagcttaaaaaaaatcaaaaaaaagattattttaagatatttgattataaagaaatgattgatttagcagagaaaaatgagtataagcaggtaaggcaaagcggagatcatattattatgcaacataataaaactaataaaatagtaccaattcctgctcatgaattaaaatatgggttaatgattcagatacaaaagcaaattcatgctaataaagcaagttaattaatattaattaatgaataaattataaattgtaatttgtagattgatgatgttaataattgtatacttaattttaaatcaatcaattacattgtggaggggaaatatgaatattactggcaaaattcttaaaaatcttaggttaaataagaatattacattagatcaattagcagatgaaattaatgaaatgtttaaaattagtattactggcagtatgctttctaaatgggaaactggtaaagcaaatcctatatatgatcacttaataagattagcttcatattataatgttactacagatttcctcttaggcgttaatcaagatgaaaaattagatctgggaaccactactactaataataataatttagataaaaacggaaaatttcgttgttctaaaaaacctaacaatattaaacgtttagtaaaactattggaagatgataaaattacaaataaggatgtggtaattttaaaagatttggttcaggttttaatatccaaaaaacataagaatctctatagataaaaaatgcacaaggagatatcttagtctcaattcgaagagtataaaatgatttatgatacaacagacaaaaaataaaagagttaaatgaagaaattaaggatattaatgttttttctaaagcatcaacttatgttatgatcaatttaaatacattagttaataagacttcatctcatatttcagagatgttgatttaaggtagtactatggggattatagatataacaaaaaggataaaggaatatcctaatgcaaataaagaaatacttgaagttatacgatgactgcaaaaacgaatttaattttaatgacgagaataccgttttggttttaaaagatattctcaatagaagatttaaatcagaaaaaaataaaacgaagtaatgtattcttgatatagtaatatttttaaaaatatgatattctatgctaatgcctaattttaaagtttggctatttttaaaggagatggtctatatgataccaataaatcataaaaaatttatagataactcaataaaaattttaaaagatgattttagaattgtaggaattgcaacaggaggatcatatattacaaatgaaatggacgaatattcagatattgattttataattgcagtagattctaaccattatgaagaagtaatggatgagcggtataaaatagcagcaaatctaggtacattgctatcagcgtttacaggagaacacgttggagaaccacgacttttgatatgtttatatggtccagaattactacatgttgatttaaaattcgtatcaatagataatatagcacatagagttgaagaccctgttattttatgggaaagaggtaattttgtatcagaagcattaaaagaaaataatgcaagatttccaattccaagtttacaatggatagaggatagattttgggtttggattcattatggagctgcaaaaataggtagaggtgaaatttttgagactatagaattcatatcatcattaaggcaaatggtaataggtccactaatattgatgaaaaatggagagctgccaaggggcgttagaaaaatagaatttgttgctccagagagcataagcttactgaaagagactataccatcatatagtattgaaagttgtataaaatcgctaaagatgataatacaaatatatttggaattaagagaatactttataacagaagattttataaaacgtgtggaagctgaaaaatattctataaattatttaaataaaataaatcatgtatcaaatagctagatatatattagttgatgatgaagcaataattaaagagcatgctgaaatatcacattattcataaagaaaatgtggtattttttttatgtgcattctaaaatattaggccttataaagtatatgggtatttaccaattatgttataattggtgccacaattctttggattaatgataataattaaaattatttaataaattttaatattcataaaacattacaatctttatataatctttatacgaatataagaattttaatccaatctttataccttaaatagtattatttatatttaagattgaattctgacaagatgaaaacaatgttagatttcatgcttatacacttactaattttgatttttttccgttatatcattatttctaggagtaaggaggatacaatgaaaaaaatagtttctatatttttattttttgcaattattagtattgttatgatgggtgggagtagtaatccttatagtggcaaatacataacttcaaataatactattttagaacttaattcaactggaaaatgcaaggttataaataatttttataaagatgtattttacacctatggtcaatatacaataagcgataatgaaatagaaataattttttataaagataaacgaaattatttaaatgttgaaagtttaaaagggaaagttaaaggaagtaatatagtattttatgattatatacaagaaggaaaagagtgcgtatattcaaaaatagaataatactagctttattttatatatatctatataattttgtaggtatagggtaaaattaagtgaaagttaggagtgatttaagtagatattgataaaaaataaaatccagattatcttttaaatcaaataaaggaagaagaaaaagagtcttcaagaggaaaactcaagatatttttttgggtatgcagctggcgtcggaaaaagttatgctatggctaagctaatgttattatgatttttattttaggagttattattgtaaatattaaaaccagagggtatattttaggatttgtatgttctacaattagcgtgattttatttaattatctgtttacaaaacctagatattcattacatgttatagggagaggtataaaatacttatctaggttattagaaagaacagttatctgctacttggcacaagaaaataagctatcaacttcatttatttatacagtaattaaagggggaaaagatagaagtttattaaataaggatgaagaagctgctgcgtattggacatttgtaaatgataaagaatctggtgcaggtactaacactttttatggggcaaaaggatattatattcatttaaattatatcagaagaaactaaaggagagctccttcaaggtatttatatgacactgagtggcttataagacttagtagaaaacttgcttagtatgacgagatttaatggtggaaatctgaaagttagaaaaagcattgaaattatatttagaacaagacataatatatttatatttattgcaaaggatgattaatatgaaatcaacgataaaacataatgatgtcagtaaattaagtctaggaggaatcttagttgcgttaggcgtagtttatggagatattggaacttcacctctttatgtaatgaaatcaattgttcaaggtaatggtgggttggaaaatatatctgaaaattttattcttggatctttatcattaattttttggacgataactattttaacaacaataaaatatgtttttgttacattaaaggcggataataaaggtgagggaggaattttctctctttttactctggttcgtaatcgtgcaaagtggcttattattccagctatggttggtggttcggccttacttgctgatgggatgttgacccctgttgtatctgtaacttcggcggttgaaggattagagcttattccaagttttaacgctctttttggtagtaatcaagatattattattaccattgtaatagtaatattaagtatacttttttttattcaacattttggaactgatttaatcggaaaaatgtttggaccagtaatgcttgtgtggttttcgatgttggcaattttaggaattatgcaaatttctcatgattggacactattacgtgcattgtctccatactatgcaataaagattcttcttagcaatgaaaataaattaggattctttattctgggcagcgtatttttagcaaccacaggtgcggaagcattgtattcggaccttgggcatgctggaaggaaaaatatttatgcatcttggccttttgttaaaatctgcttattattaaattattttggtcaaggagcttgggttttatctgctataagaaacccactgtatacaaatgtagaaggcttaaatccattttttcaaatggtcccacatagctttttgatttgcagtataataatttcaactttggctacaattattgcttctcaagcattaatttcaggatcgtttactcttgtttctgaagcgattaaattaaatttatttcctagattacatataatgtatccatctagatataaaggacaattgtatattccttcaattaataaacttttatggattgtttgtattggacttattctacactttagaagttctgaaaatatggaaggtgcctatggattatcaattactgtcactatgctgatgacaaccattctactatttaactatttattaaaacaaaagatttcatctgccattgccattagtatgttagttttctttggtacatttgaagtttctttctttattgcaaatgctgttaagtttatgcatggtggatatgtagcagttttaattgctttaacgttcttatccgttatgtatatatggatccaaggtcaccacactaaaattcgcttattacagtatgtgaaaattgaagattataaagcacagctaaatctcttgcgaaaagatactgatagacctaaatatgcaacaaatcttgtatatttaactaattcagagtatgcagagaaaattgaaagaaatataatgtactctatcttagataaaagacctaagaaagcagatgtgtattggtttgttaatattgttgttactgataatccttatgatgcggaatatgaagtggaaacctttggaacattttatatagtaaaagttcaattaaggcttggttttagaatggaacagagattaaatatgtatttacgtcagatttctactgaattagttaaaagtggagaaataaatattcaatctagaaactatactattatgcccgatagaaaagttggcgattttcgtttctctttaattgtagaacagctttcatatgaaacagaattgaatttttgggaatccttcatatacagagctaagttgtttataaaaagatttactgtttctccgacaaaatggtttggacttgatactagtgatgttgatattgaaaatgtcccgctctttttaggcagctgtaataaggaaacattaaaaagagtttcaaaataactttatcaagttcaacaactaagattcaggtgtggtttgatctccagctgaatcttagttgaacttatatcctcaagaggtacctcgtcaaggatcgtgctgttatctctcactcaaagaagtggaagtgttacagtttaatgtataaatattaggattacttcaagtaaataacaaataatatttttaaaattaaaggcaataaacatcatcaagtgtttattgcctttttttagctattttatgagaatcgtcaccagttaaaggagcttcactagaaaaaccacacacttcaccttcatcatattcaaaatcatttttaggaacctttgcggctctttttccagccataaattatgaatcctcctttggcagtttatttagaagtatttttatgtttattcttaaaagatatatgattgtttattagagattctattagaaatattaatgactaaaggcttaaactcctcagccaatttatcttttgataagatatctccatttttacatgtgtatattgttaagacatgtaaaaaaaatagacataaatccaattgatatattaagggacttaattgcgacaacagcaatatataaggtttcataaaaaagaagtgattggcatgcttattgctaataataaaagtaacacttgaaaataaataaatttatcaaggagggaatttatggataaaacggaacacttattgagacacgttgaagaaaataaacagtataagcagcaaattaaaaaattaaagaataaaatatttttagcaaaaatacttaagtatgcactaagattaagcaacttgctttatgtagtaccaatcattctcattctctttatatttagaaataataggttgattggcgcatttatttcaatagcatatttttatacaatatgtatgctgttaaagttagatgaaaacagtagaattatgaggtttttaaatgaatattcggattcaaatcgtgatattaagatatatgaacaagaattaaaaataaagaaaaatgagttgtatactaaatctcgttaagaaagtaggaaattaactcttcaaaaattaggaaactcaatctagaagaagtcattctaagaaatataattaaaggtgtacaaaatatagacataaatccaattgatatatttaggaattgattacggaaaccacaatatataaggtttcatggaaaaaaatatgattggcatgcttattgctaataataaaattaacgggagtagtaagtgaactaatatatataacttaatttttccacaatctttagtgcaatgctatttgctatttaaggataggatatcttttttaaaaacttttgtaaacaatttcgtattcccatatgcatagtgaaatatgttttcattaatagataaggtggtagatacttaaaaattaaatttaaaaaataaataaccaaatttgaaggaggtcattaaaatggaactaaaaaatgtgattcttgaaaaagaaggacatttagctattgttacaatcaatagacccaaagcactaaatgcattaaattcagaaacattaaaggatttagacgctgttttagaagatttagaaaaagacagcaatatgtatacagttattgttactggtgctggtgaaaaatcttttgttgctggggcggatatttcagaaatgaaagatcttaatgaagaacaaggtaaaaaatttggaattttaggaaacaatgttttcagaagattagaaaaattggataagccagttattgcagctatatcaggatttgctcttggtggtggatgtgaacttgctatgtcttgtgacataagaatagcttcagtaaaagctaaatttgggcaaccagaagcgggtcttggaattactccaggatttggtggaactcaaagattagctagaattgtaggaccaggaaaggctaaagaattaatatatacttgtgatcttataaatgcagaagaagcttatagaataggcttagttaataaagtagttgaattagaaagtttaatggatgaagcaaaagcaatggctaacaagattgcagctaatgctccaaaagcagttgcatattgtaaagatgctatagacagaggaatacaagttgatatagatgcagctatattaatagaagcagaagactttggaaagtgctttgcaacagaagatcaaacagaaggaatgactgcgttcttagaaagaagagcagaaaagaattttcaaaata

SEQ ID NO: 148 - DNA, 10938 bp, Clostridium beijerinckii
atataagatattacaatatttattatatataggaggatactataatgaagcgtattgataagatttataactatattttaaaaaattctaagaactttaataaagataaatttttagatcaaaaggggtttagtgcccaagaaattggcgaaaaattagatatattaaggaataatgtttcaaaagatcttaatattctctgtagagaaaagaaaattattaaaataaaaaataggccagttatgtattttgatagaagttgccttgaaaatatactatctataaagctacctgaagatttagaggaaatattagatgttaatatattactttcttctccttcaaatgcatttactgagaataagtcaccttttaactatttaattggtgctaatacaagtttaaaaaatcaaattgaacaagccaaagcagcactgatgtacccaccaaacggattgcatacattaataattggtggtacaggcgttggcaaaagtttatttgctaacataatgtatgaatactctaaatatataaaaaggctctcaaaagatgctcctttcgttgtttttaattgtgctgattatgctaataatccacaacttcttctatcgtatatttttggacacatcaaaggttcctttataggtgccgctaaagagaccgatggtattgtttcaagagccgatggaggcattttactccttgatgaaatacatagattaccacatgaagctcaagaaatggtatttcacttcatggatacaggaacttacaataaacttggcgaaacaggtagcacccgaagagctagtatactattaataggttccacaacggaagatcctaattccacattacttaatactttcataagaaaaattccaataactataactattccaagttttgatgaaagaccaattgatgatcaaattgaattgatacactatttattatcaaatgaagctcaaagagttaacaaaactattaaaatttcagctgaatctattgaagctttaataagaagtacatcttacggaaatgttggacagcttaaattgaatattcaattagcgtgtggaaaaggatttttaaactgtattaatacagatgaatgtattgatataaatttaaacttattcccatctaatataaaaaacaaaattttaacttttagcgctaaaggaaaagttaatgtaacagaatgtgatacaatccctaacacaattacaattcaacccgatggtgataaaactttcttagaaactgatgattataaaccaccttttaatatttataacattgttgaggacaaaacttctgctcttcatgaagaaggcatgagcgatgattatataaaagattttataactactgacatcaatattcatttaaagcaattctacgctaggcttaaaaacgatacaaatcgtcgtgaagtcttattaaaaattgtcaataaagatattgttgaatttgttgaagagatcaaagctctggcagaatccagattaaatagaaaattaaatgaacgatttatttatgcggtaagcctacattttagcgctctgtttaatagaattaagaaaagaaaggtctctttttcatcacatattgagctacagttatctgttaacaataaagaatatgatgttgcaactgaaatccatcagttgacccaaaaacgttataatatgactattcctgcaattgaggttgattatctatcattgcttttagcttcaatacaagaatcctctcaccaagaaagggttgggatagtagttgcctctcatggttcgagtgcagcaacaagtatggttgctgttgctagaaagctctttgatgttgataatattttagctgtagatatacctcttgaaatgacgccttctgatatattacaaactgttattgaaaaagttaaaatagtcgatgaaggtaaaggagtattgcttttagtagatatgggatcattaaataatttgagtgatgttataaatgaacatactaacattaatactaaaagtttagatatggtatcaacacaattagttctagaggctgttagagcatgttccctctataatacaaatctaaacgccgtttattcttatctaattaatggttttagaggctatgcaaataacattattactgaatactaaacttcatccaattctgaatttagtatcaaaataatcttgtaaatattagataatatattatttctaaaataaagtatattaaagaattaatacacagtattgactttgtataattttaccatattaaatacaatagaactgtattcttaatcgtattgaatattctctgacacactaatgaggctgttaatgctatatattagtatccaaatagtaattaaaaggtggtaaagtagtgatttcattaattgtaggcatttataaaaatttctcaaaaaagcctatcaaatcagcaaaaatgattttcggtactcaaaaatgtagacatagttatattaaaatcacgtgaggatataggtaatctagttggaacatatattaacacaattttcaccttcaggtgttcaatctcacatagttgattaaatttgttaaaaaaaatgtagttaatctacattttttttaacaaatttaatcacttacattcagatgattatttattttttcttttgaaatcagttattttttctttaaactttcttacttcctcttttgttttatttatttctatatgatctaaattacctctacctaacctatctgagatggaaactaagaaaatctcatttatatctacatctcttagcatgtctcctatattttgaaatttcatatctttagttacaaataaactttgcatatgccatcttacaagccctcttacttcatctataaagttttcttccatattaaaatatgtaagaaattctctagccatttcagctcctatactgtcgtggttataagatgttagtcttccttttcttaatttagtagtaggttttttacctatatcatgcaatagaagcgcccacataaatactcttttatctctgcttctttctctatttactgctccttgatcaataaccatcattgtatgtacaaagacgttcccttccggatgaaatttaggattctgatcaacatctcgtaagtcacttatcattgaaaatggataattatcaagattatgattttttagtgcattctctaagtaaatagatggcttatcatcgctaattaaacgctcctcaatatttaaaaaaatttctttttcattcataatatactcctattagacattttctactgaaccaataaactttattttaattcaacaatattagtatatctaatatcaaaattattaaactcaaaagtttttaaaaagtcactttcaatattaatacattatttatatatagaaaatagtaggtaaatctatatcaaaacagatcaacctactattttctatatattttattcttattgcttactgcaagttagattctatattaattggtgaatactttatttctataaagctgaatttcctctctcacctgttctaattcttatagcatctgcaatatcaattataaatatttttccgtctccaacttcaccagtcctagcaattgaagtaataagttcaattacatcttctaccttatcatcttctacaactattttaacttctatttttggtaatacatttgttgttatttcagtacccctatgatattccttccagccacgttgttgtccacatcccataacttgacttatagtaacaccatttatatttttattctttaatgcttctttaacttcttcaagcttcgaaggtcttacaatagcttctactcttttcataatatacttcctccctaatcatctatataatgtataatattattttaacaatatatatctaaaaattatacaactaatttttatacaaatactttatcacaatatatacattacacaatactataaagtttcatggatatattaatatttagtctaatccagtaaacgctgggtatgctgtttcaccatgctcagcgacatcaagaccatcagcttcttctgcactttcaactctaatagtcataaataatttcataactttcaagataataaatgtcataaccgctgcaaaaactattgttattgctataccttctatttgagctattaaaagcttaatatctccaaagaaaagaccattccattgtgctacagagtttattgctgtttgtccaaatagacctgttgcaatacctccccaaactcctccaattccatgacatccaaaggcatctaatgcatcatcatatccgaatttagatttaactgcagtcatgaagaagaagcatattggagatactatagcgcctattataattgaactccaaaggggaacgaatccagccgccggtgttattgcaactaatcctacaacagctcctgttgcagctccgagtattgttggctttccatgttttattttctcaattagcatccatgaaagtaatgctgacgctgccgcagtatttgttgtcatgaaagcatgaactgcaagtggaccagcatttaatgcactacctgcattgaatccaaaccaaccaaaccaaagtaatgccgctccaagaactacaaatggaatattgtgtggcttatatgacatcataccatatccacgtcttttacctaatacaatacaagctacaagtcctgaaactcctgaacttatatgaactacatctccaccagcaaaatcaactgctcctaaagagtttattaatccacctgaaccccacaccatatgtgctagtgggtagtatactaaaattgaccacaatgctatgaatataaataatgctgagaatctcattcttcctactaaagatcctgttataagagccggagtgattattgcaaacatcatttgaaatgctgcaaaaagctcatgtggtatagtaggtgcatacgatgaaggatctccacctactccattaaatccaaaaaagttaagtcctcctattactcctccaatattatccccaaatgctagtgagtagcctattaaaacccacattacagatgctaatccacaaataaagaatgaagacattaacgtatttaaaacattttttctacgaaccattccaccataaaagaatgcaagtcctggtgtcattaaaagtacaagtgctgaacaaatcaatataaaactgctatcgccaaaattaatttccataaaaaatcccccttaaatatagtaagtttaagatataaattgctaattaacatcttgaaatcacttaaattttttcaaataactgttaatagagagataactgcgcacattatctaaaaatcaatttaatagtctcttagaattataattataatttttataaatgaaaaaaggtgcttgagaaatatacttacgagtatatttctcaaacaccattgttcttattgatagtatattatctccatataagattgtcaacatttttttcaaaggagatttaattttgtttaacatctaatcaaaaacacttaatgtattaattattattttttttatattttcatgcttaattggcatttcctcattcgctcctattaattgaatcaaatttacgagatctcttagcttacttatgttataccaattttgagtaagcttataatctgaaaatttattatactcatattcaaatgcctcaattaattttctattaaaatattcttcatatctaaagaactgtcctatgtctgctaaagggtgccctgctattacgaactcccaatctaatatacctgctagcattttattttttattattatattagtcccctgaaaatcgccatgaacaagcctaggatccttatctaaatctcttaatgctttttcattcttcctaactacgcgattaatgtcatttacaatagtttttcctaaacgcttcttagctatatctcccatgaagctttcataccatgaaacaagtggtggtagttcttctcttatatgtaaacattcatctaaagccccaaccttagaaaacttatagctatgtattttagctaaagcccttgcaacgtttctaacaaaactatcctccaaactataaccttctcttatagcctgccctatagtctttccctcaatatattcataaatggcatattctctgtttccaatatcctcatcttcacttactctatatacttctggtacaggtacgaacttagagtttcttaaaaaatttaataatttaatttctttcttataatcctgcccctttataaaaaatatttttaatatatattttttttctagattattagattcaacaatataatttgtagtcctgcacccagaatctattggtataatattattaatgtcacattctttcaatatacctttaaataactttttaatcgttgcactactaacttccaaaaatggaaatgtcctttcccatctatattccatgccttacctctttatttattcaacttattgcttataatcaaaattaaatgaaaatattcttaaaaaaagtttttttatgagtcccattacttttaagtaaaatattaaaatttacgacaatatctaaacaatatattttactatttcctttggaataatccactaggatgcttctaattcctttacataatcataagctttctctatagcttctgtttttgtttcgtatatatgacttactccaattttaactacaaaccccatcttatttagtactttcataggttgattttgtacatgtgttaagcaaagttttatattcaactcattacaatgtttaagtaatctagttaatgcatctattgcagatgcatctattgcgtgagtatgtctcatgtctaaaattacaacccccactgaagattcaatttccttcattttatcaaaaaactcatttactactccaaagaacatcggaccatttacttgatatacgcgtattcttccatctgctttttctagtacagtattagtatctttatcaaaaaccttttcctctaccaaatctctgattttagtagtatcagatactctcttcataaataaaaacattgtcataatcattccaattgctattgctacaactaagtcaaatataaccgtacatgtaaatgtaagtaataatacaataacatcacttttaggtgcctttaataatgatttaaatactttccactgactcatattataagcaactattattaaaattgctgaaagtactgacattggtatcatccttgcaagtggcatcaaaattaacatagtagctaacaatgttacagaatgtaccatacctgatattggacttcttccatttgattttacattagcagcagttcttgcaatcgcacctgtagcaggtattccaccaaatattccacatataatattagctaaaccttgagctataagttccatatttgaatcatgtttatctgatatcattccatccgctactgttgccgataatagtgattctaatgctgccagtatagcaatagtaatcgatggagcaaataatttatttattacatccatatttatcttagggaaaataggcattggtaatgttgatgatatctcttgaaacctacttcctatagtctctactggtatattaaatattttcacaaaaatagtagcgacaattagcgcaatcattgatccaggtattgtcttgctaactttaggccaaaatatcattataaaaatacagcttatacctattattagcgaccatgtatttaacgttcctatattggtaagataacttttccattttgcaaaaaactctgctggaacattttcaattttcaatgctaaaaaatctttgacttcagtggatactagcgttactgctataccagcagtaaatcctattgttattgtctggggtatgtacttaattaatgaaccaaactttaaaatccccattattattaacataattccagccattatcgttgctacaacaagtccacctataccatactcttgaataatagaataaattataacgacaaaagccgctgtaggtccacctatttgaactttacttccacctaagagcgaaataataaatcctgcaaatattgctgtcgtaagccctttctctggagatactcccgatgatattccaagtgctattgacaatggtaatgctattacagctacaataacgccagctataatatccttcataacttgctctctagtaatttccttgttcttaatcatagaaaagaacttaggcatcatttctaatcacttccttattaaatttgtcagtctctatcttactcctaaatgctagagtagtcaaaataatcccttgttattactacattactagaataatttatagagaaattaataaaaagtgatttttattaaagttaacttattcaatttttttaacaattatctataacataattatgctttttctcttaaatacctaatatcttatctatcttactttctagtccttttgtaatgttcatcaatggcaatctaacctcatcagaatctattagccctagtttctttaggctatatttaagaggtgttgggttgggttctgaaaataatagcggtatcattttatatagagaattccatttttttagtgcaacttgatgatcattagccttagctaagttatatacctcaataaaatctttagtatttagatgtgctgatgccattattccgccttgtcctccaagcataagcgtcgtataaaaatacatatcttcgcctgttaagatggaaaaatcttttgggggattcattaatagttcagttgtttgcttcatgcttccacagcagtcttttattcctattatgttttttaactgagataatacatgcacagtttcattttcaatattagctccagttctatatggtatattatacagtactatatccaaatcagttgattctgatatacttttaaagtgctcataaatacctctttgatctggtctcgaataatatggtgtaactgatagtattccattcactttatgcttttctactaattttagctttttaattacttcacttgtattattgccgcctaatcctacgtatactggaactctattcttattatattcaacagttttttctaaaatttcttcatattcattctctagtattgtaggtgattctcctgtagttgcaagtggtataattccatttactccttcttctacgtaatgattaatcattctttcgtaagatttaaaatctacctttccatctttaaatggtgttaataatggtactagaactccttcaacctttgccaacttctccaactcctcaaatctattttattaaataagaaaacccgttagcatatataccaacgggtagagttaaccgcataaaacttgtacaaaactaaaacataataatatcataactataacattattatctatagcttcaccaaatccttgtagctctccactttcgtgacagttatgcatatattttatgcatacccagaaataaatttttgcataatctaaatcttcggctataatacctttctttattagtcaacgtttgccaactcataataaatactctttattaatagcacctctaccttaggttttcgttattacattattagaattatatcatttaattaactacttgtaaataaaatagcatctatcactttgccaaataacataattattactaatattattatcggctttataatcttcgctccacttttaattgcaaaatgtgcccctaaataatttcctaaactagcacatatagctgcaggtatacctatcataaataaaaccttgccatttaatatataagctattagtgctgcaaaattagatgccaaattcactatcttagcattaccagacgcagttataagattgaatcctaaaaacgatgtgaaagctaaaactaaaaatgttcctgttcccggaccaaaaaatccatcataagctcctattactaaacctattattcctgccactaaataaatctttctatgttctactttcttttcgttattttctactccaatctttctgttaaacaaaagaaaaattgcaacaataggtaaaatgataataagacagtattgcaaatacttttcatctagtagcaatactaattgcgttccaaaccaagatcctataatagcacctatagctgaaattaatgctggtttaatttttatattaccactacttaaaaattttatagaagctgcaaatgttccaataccatttgcaaacttattagttccatatgccatatgtattggcattccagcaaaaatatatgctggcaaagatattattcctcctccacctgcaacagcatccacgaaacctgcgcaaaatactaatgggcatatgataagcaatgtcatattatatgaatacataacctctcctaacgacaataagctaattatattctctataaagataattagcttattacgactttaataaaactaaaataaaaaagatagtcattacaactatcttttgcttacctcgcaacgtcctactctgccacacagtctcccatgcagtaccatcggcgctatagaccttaactttcctgttcggaatgggaaggagtgttacctctatgccatcatcacgagatctttaatttgaaagaaattttgttctttcaaaattgcacatagtttctttaatgtatttacaacttgactatattggtcaagccctcgacctattagtatcagtcagctaaatatgttaccatacttacacctctgacctatcaaccttgtagtcttcaaggggtctt

SEQ ID NO: 149 - DNA, 10480 bp, Clostridium beijerinckii
atgaaagactaattgttcgattttttattaatccttttaaatattttacagtgattatatttaatcctcattattatttaaatagctgtaaagtgaatattttgaaatatcatagaactttgaaattttatctcccgatcttttaattaaaagcgcacctttactctctaaatatttaatggctttcattttatcttctttagtcatgaccgcaacaggttttccaattaattgatacgattcctcaattaagtctttgagaagttgattaacatcagttggaattgtaacatcactttcatcactgcgttctacttcctttattgaaacaaaatcttctataatcttattagataccattagctgagtgatatcataattaatacaaagaagtgctttcgctttaccattttcatctggaatgcatatagtagtagatttcaaaatacgtccatcatttgtacgggtactataactataatggtctttatgctgaagatttgagtgaattgtttccattgcaattcgcgatgcaacatccccaactttacgtcctgtaacatgaccattttcaatcgctataatgctatgttcatatcctgcttttagatcatgaatcgcgacttcacagtttggaccaaactcttctgcaatccctttaataagccttttaaaaaaatccaaatcatcatatacattcattctaaaatctcctttatcatcttatatttacattacataaatatgttttgttataattcaaagcatacaaccaactattgtggccactgtgcttaatatattaaataaacaatatactattatccaattacttttctcttaataaattttccatcaccttttttccctaaaaacttattatttttataagctactttaccactctgtattacaatatcaatatctccctttaatgtcatgccttcaaagcatgtgtaatctacagctccatgaagcatacttcttgtaagagtatactcagaatttgggttaattatagtaatatcagcatccccacctggaatcaaagaaccctttttaggataaagtccataaatctttgcaggatttgtacataaaagttctacaaaacgattaattgaaattttctttttcataacgccttcagagaaaatcacccttactcgttcagcaacgccaggagctccattagggcattttgtaaaatcgttaatccccttttgtttgtcgccttttagattgaatgaacagtgatcagtagcaattatattaattgcaccatcttgtacgcctttccatagagcatcaatatcattactttgacgcaaaggtggcgacattacatattttagtccattattatcttgctcaagatatttttgctctgtcattgttaagtactgagtgcaagtttcagaaaaaatattcttttgcccttgtgctcttgcttttcttatctcatccaatcccttttcagtagaaatatgaacaatataaattggagcatctcctgccaatgctgcaagatgtagcactctgctaattgcctcggcttcacaatggtctggtcgtgattttgcatgatatattgtttctaaacagccatttgaaacataattttctctaaggtaatttataacatcattgttttcagcgtgtacagcaataattactcccaattcttttgctttttttaatacttttaaaattgagacgtcatccagtttaaaatcatatgtcatataaatcttaaagctagaaattccttctttagccaaagactccatttcagataaaacctcatcatttacatgctgtactactccatggaatccataatcaattactgcttttccattagccaatttatgatattcgtcaatttggtggcgaagagcacaatttttaggaccaaaggctacatgatcaacaatacttgtagttccaccacaaacagctgcaacagttccagtataaaagtcgtctattgatcgactatttccagattgcaaatccatatgagtatgcacatccactgctccaggaattatatacattcccaaagcatcaataatttctgcattatcattggacaaatttgttccaatgcaagatattttattattttctatcataatatctgaacaataactttctgattcagtcacaatagttccatttttaataataatcattcataagcacttctttcattttaggcacatgaaaatgaataacaattccaaagttgccatggatatttttcatcaggtaaggaggcgaattgccctcatagcgggcctattaggtcaatttgccgatgagcagagaacccaaatctatgatttggtgtgaatcgcttactcagtgagcgtagcgagtcgagcttcccatgatggaaaataggctggcaaaaggacttgttatttatttgattgtgcctgatatttttttgattattccttatatgtagttgtattcctctcctcctaaatctctagttaaacttatatcctcaacgagtacaatgtccaacagctagctgtggggcaaaatatttatgatttcagtgagttactgcgtaagtctaggttacgattttgatatctatagatatcaaatttgagaattatacttatagcttgaaaaatctgctatatcagaaaggacaggtactcttttgtaaccacaggggtcataatatgcagtgttacattagagaatatgttgcaggcatttcttcatcataagttgttctatttttgcttgtcacgagcttgtctcgggagcatgctgaaatggtgcaacttatgctgttagaaagcctcaacttattctcagtaaccgaaacaacagagtacctgtcctttcggtaagttattgtataaatctaagttttggatatctatagcacaatgcataaatttaactttacattttaaagtgagttcctgttttacctaaaattccatcatgtactttacttagaagcgtaataattgcagtccttccttttcctgaagaaacaaattctaaagctgcttgtacttttggaagcatagatcctggtgcaaattggccttctttaatatactttttagcttcttccactgtaagtgaatccaaccacttaatatctggtctaccaaaatttacagcaactttttctactgctgttaaaataatcaaactatctgcatctatctctttagctaacaatgctgctacaaaatctttatcgattactgctggtacaccttttaaatggttgttttctgtttgaataactggaattccaccaccaccacctgcgataactacttctccagccgatactagttctaaaatcgtttccttttcaattatgtcaataggttttggagaacaaacaacttgcctatatcccctacctgaatcttctttcatcacgattccggtcttctctaatttttcagcatcctcttttgaataaaaacctccaattggctttgtagggtttaaaaatgcgctatcattcggatccacaagagtttgagtaatgagagttgtgacaggattatttaaattacgtgataaaagttcttccctaatggcattttgcaaatcatatccaatatacccttgactcattgcaacacacattgttaatggtatttgagagtttttaacaagctccattgctgagtttatcattcccacttgtggtccatttccatgagtaataactacctgatttccactttcgattaaatctacaatacttttagaagtagcttttacagattccatctgttcttccagtgtatttcctagtgcatttccccctaaggctattacaatcttactcaccatatattcctccaattctctttttaaatatttaggcactagaaagaaaataacaattcaaattatgccatgaaatgttcttatatgcagcatagctgctctttttaaataaaatgttcttatatgcagcatagctgctctttttaaatgtgtatattttttattaattactaacccctgaatcttatatcctcactttgagccattttttctaaaacttctgcaggattctttacctttgctagaagaatcattgctgctataatatatggcttataacttgcttctttataaagtggaactctgtaacgatcaaatacagaatcttcaacttcacctttctcacatgacaaattactaatatcagctggtaagcaatgtaaataaagtgcctttccatctttagttgttttcattaattcctctgtacattcccaatctttatgttctgcattttgagcaagaagttttttctctaatgctttaataccttcagaatcgccttctgaataaagatcagtacgttctttcattgctgcaaaaggagcccagctctttggatatactatatctgcatctttaaatgcttctgccatattattagtttttgtgaatgtcccacctgattccttagcattattacgagctatattttcaacttcttccattacttcatagccttctggatgtgctaagcaaacgtccataccgaaacgtgtcattaatcctataaccccttgtggtacagataatggcttaccgtaagatggtgaataagcccaagacatagctatttttttaccctttaaattttcaataccaccaaactcatgtatgatatgtagcatatctgccataacttgagttggatgatcaatatcacattgtagatttactaatgttggtttttgttcaagaactccatcttcatatccttcctttactgcatcagcaactgtatgcatatatttatttccttttccaatatacatatcatcacgaattccgatgacatcagccataaatgaaatcatgttagctgtttcccttacagtttcaccatgagcgacttgactttttccttcatctaggtcttgtacttcaagtcctaaaagattacatgcactagcataggaaaaacgagtacgtgttgaattatcacggaataatgaaattccaagtccactatcaaacaatcttgttgatttgttatttctacgtaattctcttaatgcatctgccacttcataaactgcctttaactcatctgtagttttttcccatgtaagaaaaaagtcatttttatacatttgatcaatttctaagctttttaatgcattaacatatttatcgacaatactcataattttaatatcccccttaatttttactaacaatctttatttatttgaagtatatatagttgggacagcagcataaactgcagcacattttactaaatcttctttccatgtcttttcattaggagcatgtgcttgagcttctgcaccaggtccaaatcctattacaggaattccattacgtcccataattgaaacaccgtttgtagagaatgtccatttatcagtaagtggacgagcttttctcattgcttcattttcagcagcaccgattcttgttgtgccgtaaagacccttatatgcttcttctaatgcttttgttacaatatgatcttctggaattacccaagttgggaagtagcattcaattgggtacgctaaaccagtgtagcttggtctatcatagttatacatacttactgttgcattgtattttttaacagctggaagttgacgaatttcttctaaacagctttcccaagtctcacctgctgtcatacgacggtctaatgaaattgagcatgagtcagcaactgcgcaacggcttggtgaagtatagaatacttgagaagttgtaacagtacctcttcctaagaagttagcctctttaaactctgggttgtatttttcatctaacatttttactaagcctttgatttctttattatcagctgcatcattttcgttaaggtcacgaatgttcattaatatttcagccattttataaattgcgttgtctcctctttctggagccgaaccgtggcatgaaattccttgaacatcaacacatatttccatacggcctctttgtcctctatagataccaccatctgttggctctgtagaaaccacaaattcaggtctgattttactttctttgattatatattcccagcaaagtccatcacaatcttcttcttgaactgaaccaacaactaatgctgtgtatttttcatttaaaaggcctaagtctttcattatttttgcaccataaacagatgaaacaattccgcctaattgatcagaagtaccacgtccgcctatttcagtttcggtttcatatccttcgtatggatcaaagtcccagttatctctgtttcctataccaactgtgtcaatatgagcatcaaagcctattaaagtttctcctgtacccatatatcctaaaatgttacccattggatctatttctactttatcaaatccaacgcttttcatttcttgttctattctttttataacaccttcttcttctgcactttcaccaggtattgcaactaaatcgcgaaggaatttggtcatatcctccttatagttttcagactttgatttaatttgttcaaaattcatattctcttcccctatcttaattaatattttatttgaaatcatatttatctgatgtctatctgctgtaacactcgcactcacaaacccaacctgagtcaagtttcacttgataatgtaaataaatgcttgtttactttgtttgtaatgatatttagtagcctatgaaatccacttctgaaatattattattaaattaatctcttatatattctacaaatcatttcatttcctaaaaaaaattttttatcccaaatttatttttatggtaatatcatacatcttttcaattaacttgtaaatattttcaagttatcttttttaataatatttctattatttttttactagcagaaaacaaaattaagcatatgtaatacactattgtatttttatagaattaatgctaatattataaaaatcataataaaaccgaactaaacattatcaaacatgactatatgaaacatatttaaatattgtattatatatttattctattttgcattgatttttaacagtggtaatctactctaattaaaattttttagattggctgctacagaattatgttatattttttgacaattttttagtttgtctaacttttaaggaggaattaatatggatttttcacctttatggatttctataaaaactgctacattatcaacaataataacattctttttaggaattatagtttcttattggatgtcaaattttaaaggaaaatctaaaggaataatagatgggttatttactttacctttaattcttcctccaactgttgtaggtttctttttattgcttatctgtggtaaaaatggtcctataggaaagctgctggacctcttcaatacttctttaattttcagctggagtgctacagtcattgcggctatagtagtttcatttcctatgatgtatagaaccacgcgttctgcttttgaacaaatagatatcaatattctttctgctgccagaactcttggccttagtgaatttaaaatattttataaaatcgctattccattagccatgccaggtattataggtggactggttttatcttttgcaagagctatgggtgaatttggcgcaacacttatgctagcaggtaatatccctggaaaaactcaaactatgccacttgcaatattctttgcagccgaaggtggagatatgcaaaaagcgattctttgggttattataattgttactttatcattatttctaattctaatattaaactattggtcagaagttcaattaaaacttatgggaaggagtgataaataatgtccttatatgtaaatatagaaaaacatctctcctcatttaatttaaatgtgaattttgagcaaaaaagcggtgttctaggtttcttaggtgcatcaggatctggtaagagtatgagtttaaaatgtatatccggattagttactccttctagaggaaaaataattgtaaatgataagattttttttgattcagagaataaaattaatttaactccacagaaaagaaaaatcggttatctatttcaaaattatgctttgtttcctaatatgaatataattgataatattgaaataggcatttctaagatggaaaaagatcaaaaggaatccttaatcaaagaatatatagaaagattacatcttggtggactcgaaaaacgctatccttggcagttatctggtgggcagcagcaaagagtagctttagctagggcacttataacatcccctgatattttacttttagatgagcctttctctgctttagatcaacatttaagaaatgatttagaaaaagaattaatgtctatagtaaaagattatagtggtaatattatctttgttactcatgatatagctgaagcttatagagtttgtgacaatataattgtttatgaaaatggagtttctttagaaaatcgagaaaagaaagacttatttaaacatcctaaaagtcttacagaagctacattaacaggatgtaaaaacatatctaaagctaaaaagactgggaaaaataccatttatgctgaaaattggggccacgaatatgttattaatgacgaaattccagacaatatccaatatatctgcataagagctcatgatattgaaatatgcacaaacaataatgaaaacattaatacttttccttataccattgatactattatagaaaacccctttgaatttactatatatatgaaaaacaatactaaaaaagatgcaaaattgattgaatttaaggtagaaaaaaagaatatgaatttctctctaaacactagtgtatatctcaactttccaaatgacaatctattttatttttagacttaagtcgtttactactatatatataattaaaaagtcccattttaaatttatgtgaatatacaaaaggtgatggataatcttaagttaacttttccatcacctttgtataaaactgcaaatcaagactacaataatcttcttatataaatagaaagaggtgaattttaatataatttctaaattcatctttttcttaataaatactatttaataaccttgaattcatatccctgttgttttaaatattctataattcctggtaatgcttttgctgtttcttctttaccgtaagtatcatgcatcaaaattattgccttttcccttcctgctgtagtttttataacttcctgctttaattgctctgcattcttaggtgcaccttccgcatcctgagataatgaattccaatctatttgatgataatctttttcatgtaaagccttgtccatagtatccataccaactgaatctttattcttccaagtcatatgcccacctggaaatctaatagctctagttgaaaaatcttctcctaaaaccttttttagagactcatttgttttttcaatgtcagacatacaattcgataagtttatctttccatttggatataaataattataattatgtgaataagtatgattacctatagaatttccttcagataattctcgtttaactatatttttagtgttctcatctttatctagtgattttcccacaataaagaatgttgcatgcacattctccgacttcaaaatatctagtatttgaggtgtaactgtttccgatggaccatcatcaaatgttaaatatactactttcttaccgtctgctccatctggcttttgccccttcatttgctgattcaaatacttttcaataaatgaagaatcttctacttctgaattactctcaacattcagagaatctcggttatcctttttatcatttgaatttgaatctgaatctccactttgcttagtgtcatcaagtgcttgtacttcttgtctatttttggaaaacttcgctgcaacgagagagctacctccgactattaaaaaaactatagtcataaataaaataattattctagctttttttatgttattatctttacttttattatacctataattttttctcatatatttatttcctcctatagctagattaatttacatttttataagtatatcatatttgttttacttattgcacagaagttcgacttaaatataaattatgtaattttttgtaataatctatatattttctgtcgttttattgtatacttttccataaaaatcacttcactacaatatacgacattatttatgctaatttagctatttacaagctctaatatatgttactaatagtatatactaactcagcatgtacaatactattatcaattagtattctaattccatattactttaaaataaccataaataatttattcaaatccaaaaccgctattaagaaatttataatttttcttttatttttttagtctgccatcatactgacacaatgatatactaaaataagtacataaag

SEQ ID NO: 150 - DNA, 10431 bp, Clostridium beijerinckii
catataaattcactcctaagtgcaagggtttttaccctatatttaaaatatctatgcacttagtattccataaaatatcatacataatactattccaaacacttaagccaatttggagcagcccctaactaaaaataaaaactgtagctaaattctttactcagctacagtttttatttcttaatactatttatattttatactaagttttaaactaacaacaattagagatatcattctattcatttatagagcttcaactttaattctagattttgtcttttatatagtctgtatgctgttaacaccgctcctaatgcacatattatagctgcagcaacatatacatattgcatcccatatacaaaaatatcatctcttccctctatatatcctgtaacatgatatcctatttgactactcatcctattgtataaaagagttgttgatagtgatattccaaaaaccattcctaaatttctaactaacgcatttatacttccagcaatccctaaattttttgtatctactgtagacataactaatgaattatttggtgactgaaacatcccatttcctagtgtcattattgctataaaggcaattaatgcacctatgtgagaatattcatttaaagttgatattaaaaataaacctaggctagttccaataagtcctaaaaatgttaaaacttcagatcctattctatctgatatatacccactcattggagcaacaactgataaaattattggtgataccatcattaatacaccagtaactgaaggagctagtttcatcacgtattgtaggtaaaatggcaatataatatttgaacaacttattgccacaaatgaaatgaatgcacaaaaaatactgagcgaaaataatgaattactaaatatctctagtttcaataatggttcatcaattcttttttcaacaattataaataaaataaataatataatagagacaacaaatgatataatgattcctatattgtcatatccaatttccttgccaaaagttaaagcactgaataaaagtaccatagttgatccaaataaagttgcaccttttatatctaatttttcatttgaattattagaatttttaggaagtgtcttcattgctaaagctaatgccaaaattcctataggcacatttattaaaaaaatatactgccaacttaaaatcgatacaattattcctcctactggtggacctatcattgaacctaatgctacaaaagttccatttaatcctagcgcccttcctctttcgtttcttggaaaaacctgagttataattccttgacttgtagacatggttcctgcagctccaattgcttgcaatattctcgagaagactaacattactaatgaattagataatccacataaaagtgaaccaatcgtgaaaataattatacccaatttaaaaactgaagttttacccttaatatcagctaatcttccaaatataagaatagttcctacaataactattaaatagctcgttactacccattctatagatgccatacttactgcaagcctctgcgacattacaggaagtgctacattcactatactactatcaagtgtggacataaatgtcagtagtacagtagtaaataatattaaccatctttttttatccgtactttccatatgttttatcctttctgtttatacatgttttatctagctgtaaaaatagagtttatatataataactcaacattcataaacctaatcacaacttatatagttgcacttgcaactatataaaattataatatatttttattatttacacaaatggtatgataattctctaaatataaaaatataatccacattttaaagttcataaaaaaaattatccacattttattctaattctatggataaagttctttatattatttgtacagttttaatatgtatgttctaaaaaatttgctttatagaaatttaattgtattgacttgattatcctctaattattaaaccatgcttttgctaacatgctatcaaaaaaactgcgtgcaaataatgtttccaaatgatagattaaaaattccctaataattaagacttactattagtttcctcttacattaacaaaagcatgatattaattatattttatattattttttactttaatttaaatgatccaaccatctcatttaaattatctgacgaatattccagtacatcggttgcttgctttagttgtcttatttctaataatatttttttaaccatagacagtgattcttcacttttatttgaactattttcggtagattgttctattttatctgccatagtgcttaaattattcataacatccccaacactttggctctgggtcgaagttatttctgatattgactgcatcgcattagctattatatttacatcatcattaatatgatcaaatgattgaatagattcttttacactcgctgtagatatatctaccttagtatttatctcttctgcatattcaaatgttgcttgtgtctgtttttggacttgattaatgacattacttattgacttggtagcactttctgtttctagtgctagcttagatatttcttccgctactacagaaaatccttttccactctctcctgctcttgcagcttcaattgatgcattaagcgctagaagttgtgtctgcttacttatatttcttataacattaattacttcacttatctcctgtgaatatccctgtaaagtacttatagattctactgtattctcgatggtcttttctaaatcctccatattactcaagacttcttttgatatgctttgtgccgatgctgcactttcattagttccttcaactatacctgatacttctaatataagactatccatttcctgaatagatgctgtaatatctgaaaatttgttttttgtattttggaatactagattttggtctttagaattttccagtaaagttatcactgtattttcaatgactcccattccatttttaacttcgcttgttatattagaaactatatttactgatttttttgtagttttagctgatcttttcactctatataacatgctcatctgattatttatgaatttattgaaccatcgcgacagctctccgatttcatctgatgacattttttcaactcttttggttaaatttccttcgccttccgcaatatcttgtaatatatttatcgttctacttaaaggggatgaaatcattcttttagatattaataacgaaaacagtgataatataatccacattgctatagatgtaaatatactattattcggtgataatttaattgctataaaatttactgcaattaaaattgctgatattattgatatagatattggcatctttaaattaatactttgaaaattatatatctcagctatatcaccctcacacatcattccccatacctcatcacagttcgggggttttattaatgttcccttacctcccaccattatatgtctgtaatctggatatccaggccaacaatctagattttcaccatttcgaattgtattttcaactcctcgatgtaatttacttgtagccggatcattaaaaattatttcaaattcggtatgctctttaattctaactgtaccccaactctttgttttaactccatctttaagattctcacctaaagtaaatgtattatcctcaaatctgcttctagatattgctgttccgggcttaatatctctgctagtcttcaccataaataagtaattatctccagaatccttatatatatgagtatcctcatcttgaattacgttgctcatatcatcatttagtgttctgcagcataatattctaatttgattactgtgatttttgcatgtactggaaaacattaatgtaacatcatcagcaaatttcttattacttatatcagtatgtagggttcttttatcaatatatggtccatacattaaaggcctaccttctaatccagcttttagattaggtaaatcactcatatctaatccaatatgctctttgcacgaagaaactgatactattcctttctcatctaaaacaaatatttcgcaaaagtcctcatgcttttttacggtttcaattaaataattacatactatattatcattgtcttctaatgccacaagtgaattcttaatattttctaattgtgcccacttgtcattaaaccagttatctaatgccttttttcttccatttgatattccttcaaatactttttctgaatgttcctttagatttctattcaacagatatttaagctttaaactcatagcaatccccccatatattattcttatatctacttttaataaaaaaataaagcactaaatacagattttttaaatccgtacttgtgcttccatagcattactatttatttactacaattccttgtataacataattataccaactatattgacctttgtgaattgttatttttcacgaaaccattaataaagaaaaaaaccctatctaaactagggtttttactacattgaatagtaaactcctctaaacatagagtttacttatatgtaattatattatttatcttttccacaacatttcttatatttcttcccacttccacatgggcacatatcatttcttccaaccttatctagatttcttactatcttagattccttgtattgtttttgtatttcatttcttttttccactgagaatattccatcccattgtggtaatgtgtataaatattctgcttttgcatctagcatattcaaatataaagtttctagatttatatcaagtactatttctgtatcagcatctatagtctcaagatcatattgagtttttaaactatcattaataccatccataaatcccatagcaaattctactgtggaatcataatctttagctaattcatttattgtagtctttttaacacttttatgattagctaataaatctttatatattgatttttctaatttactatattcttcccagaaagcattttctcccttagtttttacatagtcaacaaccatgtcagtccaatttgtatataaactcatttttaagtcctcccttaaatcttcattgattatatataatatatttctataaattataagctcaaataaactatatctctatataactgctaggattatgtctgtttgccatagttaatattatgtcctcttttagcttaattccattttcatttagcacgtttaaaacagtttgatatgctaaatctggttgattattagtattactcaaatgccctaaaataatctttttcttagttgaacatttatatagttcaactatggcactcccacaatcatcattagataaatgtcctatttcgctcaatatcctacgtttcaaaggatatggatatggtccaaacttaagcatatttacatcgtggttactttcaagaagaataacttctgaatcttttatattatcataaatttctcttgtaaaagttccaaaatcagttgctacacttatgtttttttctcctgagctaactgtataccccattggcgcggctgcatcatgcggaatattaaatgctttaatactcatatcctctatttcagtaaatgatcttttatcaattacttttatgttatgctcttttatatttccaattaagctttccatagcagaccaagtatcagcatttgcatatataggaatgtcatactttctagacagtactccaacccctttgatatgatcactatgctcatgagttataaaaattccgttcaagtcttttggattttcattaatttcttgcaacgctaaatcaatttttttacctgggagtcctgcatcaattaatatcttagctttatttgaggcaataaacatactattaccgctactgccactatataaagaacaaaatatcattccaatctcctcccctttaatttatactattcatcaacttctattctcttaatatctgcccctaaagctctaaacttattttctatatgaggatatcctctatcaatatgctctatactagttatttcagttgttccctctgcaactaatcccgcaataaccatggcagcacctgctcttaaatctgttgcctttactactgcgcctgtcaatttttgcgctccatctataatcgcaactctgccttcaactttaatattggctcccatctttttcaattcatctatgtgtttatgcctattctcccaaatagattcagtaattaagcttcttcccggtacaatacttagcaatgttgacattggttgctgaatatccgttggaaatcctggatatggtgtggtttttatattcacacccttaagtggtgacttcacggtaactctaatacaatcatcaccttcttcaatcactgcccccatctctgtaagcttagctgtaattgattctaaatgctttggtataacatttcttatataaacatctccacctgtagcaacagctgctatcatgaatgtaccagcttcaatttgatctggtattacgctataagaacagccttttagactttctactcctttaattcttattacatctgttcctgcgcctcttatgtcagctcccattgaatttaagaaattcgcaacatcaacaacatgaggttcctttgctacattttctagcactgttaccccctctgctaatgttgccgcaatcataacatttattgttgctcctactgaaactacatcaaaaaatatattagcgcctactagcttatcagctttaacattaactgctccgtgctctataaacacatcagctcctaaagcttcaaatccttttatatgttggtcaattggtcttacccctattgaacatcctcctggaagaactactcttgctttcttaaatcgtgctaataaagctccaatgaaataatatgaagctctcattcttctaacatcatccgtgcacgcatcaaaattatttacattagaactatctatttctaaagtattgttatctatcttaataatatcgcaacctaagcttctaagtattctttccaagcagtgtacatcttcaatatctggtatgttatcaattatgcattttccatcacttgccattatagctgctggtaatattgctactgctgcattcttggccccattgatatcaacagtaccttctagcaagtttccgccgtttataactaatctctccattgaattcaccctatctattaaaatctatattatcatatatattattttacattattaacctattttataattaaaatctactttaattattatatcataaactaaatttatttaaatacattttttcagtccatcaacacttttttagctatatatgtgttacaacacaatttttcttatggttttgttgtaattatatcccttaaaacatatattactggaataaatatttcttttattgaaaaaatatctttaaaaacctaattattcttataattactatttaattattcttctattcttttattctatttattgtgttataatttactaagatttttattaatacaatatattgagattgtgaggtttatcatgaagtactatatagttgcattatttgatgaggaaacctatcaagtaatatcaccaatacaaaggaatatgtcaaaaaaattcagagcaaatagaaactcacctatgccttttgtcttattaacatctattgaaaatccaaatttggataaattatatccagttgttgataaaattatagcaccttataagagttttagaattgatgcaagtgatttagtctatttgtttgagcctaccaaaagtataaatttaaaaatagacgataaaggttatataaggagactttctcgtagtctttttgatatattagaacttaacggatttactgttaagtcttttggagatagttttgtttcacttgcaaatttaggttatcttcctaaggactataaaaagcaagatgtaaagctaaatttccctgagatatataatactgataaccttgttaaattaagaattaagagtgttgaaatatggaagcttcctacggtaaaaaagaatactcccttaaaatcttatattttgaaagacttttagtttaagcgttcttactatcataataaatcgcctgttaaacaatccaattagtttatgtttttaggactgtattgaatttttatattcagtacagtctttttttatattttttaaaatcactctaaatctatagttatattttccttgaaagtaaaattaatttaaaaataatctcttaatttcgaattttctaaaaatatttttttgtagtcgttttccgaactttcatttattttaaagattttgtaaaataatattattattagaaatgtaggaggattcactatgaatattcagccactatttaaagtacaaaaaaaatacaatgatagtttatctataaatgaagagctagactcccacaaattgcgagtacgcaaaaacctagaatttgaaatctctcttggtgcattagctagtgaaactaattgttttagctacttactaaaaaaatctagacctgttaacatcagtgctatattcgataaatatataacttgtatttctcaagtcttaacactaggtattgatcataaatatacagatttaattgcagtatctatggcacctaatgactattgtttaagtgatcagtttctaaacctatatattgacataaatgatttaattgctttcccatctatagatcactacttaactttatttgaagacctattaagtctaggattgacattaggtttttcagaatctcaaatacaaaatcaatttattaaagatttagacaacttggttatactttaattaatgcattcatgctaattacataacaccatttttattttttataatatttaatattcttaggggaataataattctgaggtgatgttatgtttggaataatatgtgcaataatttctggaattgctatgagtattcaaggtgtatttaataccagactaggtgagaaaatcggagtatgggaaactacattattagttcagataattgcccttgtcttaagccttatcatttttttatttttaggtgatggtaattattctaatttgaaggattccaacaagctttatttattaggtggcgcactaggggttgttataacctttaccgtaataaaaagtgttagctcaatgggacctaccttcggtattggtattatattaatatcccaattacttgctgctgcacttatagatgcctttgggttatttggcagtgaacgacttagattttcattaaatcattttttaggtattgctattatgattgctggtattgtaatatttaagtggaatcattaggagaggacggagaggacttgaatcttttttctaacattaattttttattccatttaacaattaacaatataaaagaatatgtaaaaaaaagcgctgaaataaaatctgataaaattatgaaaaattcaattaattggtttggtcatgctaccacaattattaatctatcaaataaaattattataactgaccctgtattttccaattccttaggatattttaagagacttgtaaaaaaaccagtatacataaatgatttaaaagtagactatatactactatcacatggacatatggatcatttaaatttttcatctctaaaaaaattaaataaagatgctgtctttattgttccaaaaggatatactcgtattgctagactgcttggttttaaaaatgtatttttattacatcctggagatgtatatagagatgactttataaaaattactgcttaccaagctaatcatgatgggagacgcttctattttggacatgatgatgaaagtatttcatatttaatcgaaagagaaaataaaagcgtgttcttcgcaggcgatacagcgctcaccgataattttaagaatatatcctgtgatgttgcattaatgcctgtaggttgttataaacctgatagattttcgtatatgcattgtacgccagaacagagttatgaaatgtttaaaatgatgtcttgccctacaatgataccaattcattataaaacttttaaaatttcattagagaattttcaggaaactgaagaatcattattaaatttaaatgataaagctataaaaattatagacataggggagacctacagtttttaaatggtagattgattattatttttattcaagtttcatacttgtatttatttttaataatcaatctactatttaatttttgttatacaatatttcttcatctattgaataaatattgtataacaa

SEQ ID NO: 151 - DNA, 10017 bp, Clostridium beijerinckii
ctctatgactgaagattatcacgctttaaaatcaatgtaaatattagaaacaaaattgtgaataaaagctaaaaattagcataatacacttaaataaaattatagtagatataaaaatgcttaattttattaagtctgaaatttcaaataaaatgcgaacataaatattaaattatatttataaattcgtaatattactaaaattatagataaagttttgcttaataataagaaaaaattcataaagacaataaaatagtataaaaattgagaataaataaggaaaagtttggaatatacgagcagtataatagtttatactaaaatataaagttaattttttaaatcaaaacctcgaaaagtacttgtaaatttctaataatcaccttaaaatataaatataataaataggcaatttgaataagtataaaggaagaatagattgctgaaaatttaataataaagcgcaaaggggcgtatcaataatcagaaactattaggattatttgatatgtttttttattctttaattttgctattataattaattcataaggagacagaggtatagtatatggacaagattgattttaagattattgaacttctacaagaaaatgctcgttatccactaaagcatttagcagaggaagtgtttttatcaactcccgcagtatcagcacgtattgaaaaattggaacaagcaggtgttattacaggatattctgcacacgtcgatccactaaagttaggctataatattaaggcgtttattaatttggaaatgacgcctaagcagaaacctgagttttatccttttatatcaaattgcccaaatgtacttgagtgcaattgcgtaacaggcaagtattccatgttaataaaggttgcttatcacacaactttagaattagatgcctttattggagaattacaaaagtttggaaatacggaaactcaaatagtgttctctacagcagttgagcatagaggaatagatgtgacatcagaaattggtgataaatagatttaagaaagaagactgttctagatataaacatggtttatatttagaacagtttttattattacaacataaaatatagaataatctggaggtttatatcatagaattgtaatagtataaatatatgtcaaggaaagtttctataagaaaataatttgggaattatatatatgtcgagttagagggaggaaatattgtgagtgaatatgaagaaaaattaaacgaaaataagaacataatattgagaaacattgagcaaggtaaaaaatcgggggtcaataaagtttcagccgtttttgccataagtaaaagagatgagctccgaaaaaacatggttacagatttggctacatggctaattactgatggatataaagtttctcttaaagaaggagaactcgagatattaactattgaatgggaataaaacagaaatttgtacaaaccctcaaaataagagggtttacatatatgctatataaaaagcatactatataaacatactaacataaatatcaaagtcttaagcatctaaatttataggtgctttttgttatgtgaataaataatgctattttttcacaacaaaaagaattaaagcaaaaatattgttgttttatagtcagatttgtgcgtttagagtaaaaagcatttttaaagtttgaatgttgtgataacatttacagtataagaagtgaaatacttataaaattaacacttaatttaaattttttcttcagaatttgctacacaaattttaccaaattaattgtattctatagaatattagaggggatgagaatggatggggaatataattaaaataaacatatattatgcagaatttacaagaaaaaataaaggcaaattaagattggaaacagtagaaaaatccattttgaggtatgataaatggttaaaggatacgaatagaaaagataatatagaaacttatgaggaatttttacgggttcagtaatattgacgggggatagtaagtgatattaatattacttactatcctttagagtttatagtattagtttgtttattatatttggttggcatggtggaaaacaaaatatatagacataagtataagaaattttcataaatatattaatgtggatacatatatagataaatcagctataatctagacttatgcgtgtgtatcgccgaaatgaataatatacttaaatttaaacactacaagttgtgtttaagtaaaatgaaaagataatttaaagagctagaacaaggaaatttaatatagcctttataaaattaataatctaaataagggagaggttttaaatggttaaagatgaatttaaagggttagtaaaagagtataatgatgaaagttgttcatggtgcaaaagcgaatcgaactgcttttataaaagaaaagcaatggaggctactagagaagctataaaagaaatcacaatttgtacatcagcttactgcactgcaaaggtttcttgcgattattatagaagggacagcgagaaatacaatctttataatgttaaagaagcttaggaataattgataattatatgaaaggcgctactttttattgtggtgccttttttattgtctatgaaatatatcccaactagaaataagaattatgcttttgctaaataaattagcaaaaaatatatgctagatacgaatataattaaatattgctcatatacatctatattgtctggtaatattataggactaatatatggatgcgttatggagggcaatatgaaattcgactataatttattaattttactgctaattaatttctttttgttattcatagttataggtgtaatatttaatgtagttagagtttataaggcacatgtagacaggaataaaaaaattgaacagaaatttgatgagatattgaatgagtttataataaaaacattaaataatagtaaataaagcgttaatacaagaatatttctgctttaggcgaatatatcaatgaatagcatgtaagtaaatttacttagtacttagggacatacagtaatattaactaatacaagctatcaatactatttttgttaatatttttatagattatattttgtgttattggttaatatattactgccaaacaaaattaaaataaaaggaggtagattcaaatggcatcaaataatagtggaagcaatagaacattagtacctgaagcaaagcaaggtttaaacagattaaaaactgaggttgcatcagaaattggattacaaaactatgaaaacatcgataaagggaacctatcttcaaggcaaaatggtagcgttggtggagaaatggtaaaaagaatgatagaaagctacgaacaagggttataaaaaataattatacaaaaaagcactcatagaattatgagtgctttttaatataagaatgtatattagtttatatgttaaaaacagttaataacatatattgctacaatgaacatatgtctaatgttctaataaaccaggattaattaaggaaaaatgtataaactaaattagggtatatcacattctttataaattaaacaatatgaaccatgaaatatgatataattaatattagaaaaaaatattataaaaaatatggagggactataatgaaaataaatgacagagttgaatttttagaaaatgataataaaggtaagacagggactgtaattaaattgatgggagaacatagcgctgttgttgtaatagatggagaagaagatgatgttccaactttagcaagagtgacgaatttaaaggtgatttaatctaatatttaaatttacatatattaatatatacataattttattatatgttaagtatgaaatctaaaaataatttcctcttttttatataattggttatatatttcttttgattatatataattaattatatataaaggagggagacttatgttagacggtaaaaaagagatattaacaatgtttaaaaataaaaatgatgggttgacatttgaagaaatacacaccaatgaaaaatttcagccagaggtatattttaaaaatggaaccctaactaaaataaatattttcttagttggagccttaaatcaaatggtgaatagtgacatacttgtttggagacaaggaaagtattacttaaaagaaaacgatataggttaattttctaatgaagaataagcgaagaaaatgccactatacacaattttctttgcttatttaaggctatctttgaatatcaagcttctcctagaattctgtatatctagaatatttaatccatcatgtccttttttctggctcatagcgtaagattatttcaatattattaaagttatcaatattattcatgcgttccatgcgtttcaataatggtactatctgggttgaactgtctgtgtgagagcataaattggcatgtgtatataacttaggcacataaatgttcttttcaaaagcatctactacattaaatcgatctttgtattttagaaaaggtttatcatcatcaaagcaaagagttgcaacagtttcaaatgcttccttttatattccaagttataaacaataattttttcattagttcaccttcttattagattatatgttaaggtaacagaatttagctttcctactaatatatgaaaagcaacatagttttctgaactgcataattaagttaacttatttttgattttttagacaaaataaagtataattaaatgtatattaaaaaggagggcaaaatttgtggaattgtttgaggtaggtaagccatttaaggatggtattacaaggtatccagaaggaataagtttcgatataaataaaaatgggtgcaatttattaatttatactacgaaatttacagaaaaatctagacaagctattataaagggtgatctgaaatacggatatttcaaagaagataatgttattatcatgttattcaggtttggtaatcaccaatggatagaagttccatattctatacatatgtgtaaaaattccgttgaattagaagaagttacagaaactgagggcttctctcttaatatatatattattaattcgggaacaggggttttagaagatactagacaagttgaacttgatattagattatctaaaatgttaagagatgatgtcttagaacagaaaagtatgccgtatagtggctttaatattagagtaagtgaatttaatagaaaatattcaactaaagcattagttagcatgtctagagcattagtttaaaataattttaggtatgtgtagatagctcatatttcaaattaagatatttttagtaaacaaaattgtaagatatgtatatgctgcaataataaatttatatttaaaacgctggtaaattacgtattagattaaaaactagaatgtagaaatttaattgcaacatatacatacataaatattaaattatagaacggataagtaagtataatattactttcataagctaattgctattcataagtctaatccctagattttagatattgaaataataattcttaatttatataattttagtaacagaaaggggtggaagctatgaaggttgagttttgtcttgtagaaagtgatgatattgtttttacaaaagaatctaaagatttgaaggatataataaatgtcattaccaaagtaggtacagagatcaatttgttttttagcaaagatgatttcatccatgggtacgtacaaaatgtagcatatcaagttaatgcagaaagtaatgatgagagtctaataatatatttttcaaatgattataaaaaatctaagaacacagagagaatatcagctgaacatttaagtactacgaaattaagtgctaaaaataatgataaggcataatcgaaaaaataataagtccatctgctaagaccatttcctattattctgcgtcagcagattgtcatagtaattttgctattagattaatatacctacctgtaaaagaagaataggactggtattttatacttgttattttcattcatatgcctaaataaaaattaaggtgagatagtaaattttctaattgtatttactatctcaccttaatttttttgttgtattataaaaaagtaattaaatatatatgcaacaattggagttttgtgttgagctctcaattgaagtgatctggatgctagagtattaagcataaatttattattgcaatataattgaaatagctattatttataggttcaagttatttgaaaataatatattttaggatttaatatatacatattttataaatgttgccttgtgtgctataatttatatgaatttttatttataaattgtaatttttgtgaagtatattgaaaatagtgaaggttacaagtaaaagcgggtgaactttgtgatacatataggctaaatatgaaagaaattatatatgaataaaattaaatttgtaactataaaaaataaagtttaagatacatttatgctttatattataaggagatatattatgaaagaaaaaaagaatagaaaaagatttaataatagcaggagaagtaattctataaaattagttaaaatagtatcacttttagttgtgattggaataattgcttttattgggattaataaaggaataaattcttttgctaatatggctactagtcaaaatagtgataaaaaagatgttatcgaaaacccatcagaggatgagaaaaaagagtttggggaagtaccgttaataaatgacaatagaggcgtgccggtaatttgttttcattctataaatgatgatccttcagtaaaaagccctattattatttcaaaggataaatttagaacacagcttcaagctattaaagataatggatatacgacattaacaatggctcaacttaatgattacctttctaagggcaaggctattccagaaaaaagtgttgttctaacctttgatgatggatatagagataattacactaatgtatttccaatattaaaagagtttaatatgaatgcaacgatttttgttatacaaagttatttagatagagatggatatctaactactgaccaagttaaagagttgagtagtagtggaataattgatatagagtctcacacagtttctcatatcgatcttcctactatgtcatatgaagatcaattaaaagaactaaaaaattctaaggaaaagttagaaagtttaattaataagcctataatttcgattgcttatccagaaggaaaatataatgatgatactaagaaagcttttagtgaagttggttattcaatgggatttaccactgaaagaggatatgctgacagagatgataattccgcagaattaaacagaatatgcgtagattatacatataagcctaaagacattctaaaggtattaaaaaacttgaaaaagtaatttgagattttcttttgaataagattaacaaaaatccgaacgaaaagaaaaaatatttacaaaacgttctcttaaaattgacaaaatataatataaattatagaataaagagagcaataaagatgcttattgtatattatccaattcaattagaattggataatatttttaataaggatcttaaaaataacttatgaatggagtagataagcatgaaagcaatattaacagtaattgggcaggacaaagttggtattatagcaggggttagtcagaaaatgttagaatatagtatcaatatattagatgttaatcaaactataatgcaaggtttttttaccatgataatggtactagactgcaaagatatgaatgcgacttttgaagaagttcgtacaggacttacagcagagggtgaaagacttggggtagaagtaaagattcaaagagaagaaatatttaagtcaatgcattcactataataggaggggcttatgaatactaataatatacttgaaacgataaaaatgattgaggaagaaaaacttgatgttagaactataacaatgggaatatccttgcttgattgtatagatccagatggagataaagctagaattaagatatatgataaaattacaaaatctgcagagcatttagtagaggttggaaggcaaatagaaacagaatttggtattccaatagtaaataaaagagtttcaataactcctatgtcaataattgctggagctactaatgaaactagctatgttgaatttgcaagaactttagatagagcagcagagactcttggaatagatttcttaggtggattttcagcattagttcaaaaaggctgtacaaaaggtgataagattttaataagttcaattccagaagctttagcagtaacaaaaaaagtttgtgcatcagttaatgtaggatgcacaaaatcaggaataaacatgaacgctgtaagagatatggcggatgttataaagagaactgcagaacttacaaaagatcaaaaaggttttggttgcgctaagttagttgtatttgcaaatgcagtagaagataatccgtttatggcaggagctttccacggagttggagaagctgagagaattataaatgttggtgtaagcggaccaggcgttgttaagagagcgcttgagaaagttagaggagcatcttttgatgttgttgctgaaacaattaagcaaactgcatttaaagttacaaggatgggagaattagttgctaacgaagcgtctagaagattgaatgtgccttttggtatagttgacttatctttagctccaacaccagccgttggtgactcagttgcagaaattctagaagaaataggactagaacaagttggaactcatggtacaattgcggcacttgctatgcttaacgatgcagttaaaaaaggtggagttatggcatgtagccatgttggaggcctaagtggagctttcattccagtatctgaagatgcaggtatgattgatgcggttataagtggatcattaaatttagaaaaattagaaggaatgacatgtgtatgctcagttggtcttgatatgattgcaattcctggagatactccagcatctacgattgcaggaatgatagccgatgaagctgcgattggagtaataaataataagactacagcagttagaattataccagcaccaggttgtgaaatcggtgatatggtggagtttggtggattattgggtagagcacctgtaatgaaggtaaatggtaaatcatcagaattatttgctcaaagaggtggaagaattcctgcacctatacattcatttaaaaattaataaacataaaaataagacctacaagatattaaatatatctttaggtcttatttcatattctatattatttctaaaataagcaattatagaaatcttttcttttgtaatatcgaggtgtaaaaatagccttacaggataaaattagttggttgttttataataagaataatagtggccataatgcccaagcattattaaaaccatatccaccaccatatccgccataaccaccgtatccacaaaagtttccgtaattgtatccacagcaattattgcaacatctgttataacagcatctgctcatagttcatttctcctttgttaatctatatcatttgttatattaataatatattaaacataattaaaaattgttacatattaaacttaaaaataaaattatctataaggatataacccgccatatttttattatacaaatttatgtaaataagatcttataggtgtacatactggggtagaatagtttaaataaagcattttaatactagaataattgaaaataatgtttaaaaagacatgaaattaataaataacatagttagagtataattttagtaggcaaagataataaagaatactatataaataataaaggagatgcaaaagcatctcctcaatacataaattatccattataattaagttgacgaaactaaatagaata

SEQ ID NO: 152 - DNA, 9886 bp, Clostridium beijerinckii
atattgtccataataaaataatcctttcatactcttagttattaatgtttaaacattgatttaaaatttccattgataaattgtacatggttacaactttatatgtaaccataaatatatacgtgaaaatagtcagtaacctttgatttaatgtaattaccacaaaacaataaaaccaaaggaggttactgaataagtggttaattatatcaaattattcgatataattatagaatttattaattgggatacattgaaacattcagaatttaagttaaatgctgataataaaatttcgcaactttttactaaagatcacttaaaatcaatgatttatatatataacataagttatttaactactaatttataatacagaaaagagtaaatatcaacagtaattgcataaattgtaattattaatgcataaacagaacaatattacatatattgaaatattattctgtttatgcataattgtccacaattcaatgaaaatgtatttattataattggataacatgataatatgcactcatagatacgaattatccaatacacctttggttttagctgcttgtttgatttgtgtactaaatttggtacacaaatcaactaagtaaataatattttatggagaagtgttatgaatggaaagaaagaggacatgcaaatcctaaataatcttctaaaattatttaaaccatttaaattgaaaataattttagtaattatctgcataacaatgtcagctggtttaagtatattaacacctactgttaatcagcggttaatggatgagggattaattgcaaagaatttgaagataattataacatattcaatttgtaatttaattctaataatgattattcaggggttaggaataattgaaactaaatatcgttcttacatagaaaatttattatcatataatcttgaggagcaagcttttacacatactttaaaaatgaaaatgagtttctttttgagcacaaactatgctgagataatgaataatttaaaaatagatattggaaatatatcccaaatagtagatcaaagtacattttatattgtaacaagtatttttaggattatagttggaattataggacttattactattgactggagactaagtattttggtgctaatagcaaccccattaaggtatttaatcgtgaaataccttgctaaaaaaagaaggaacttattcgaaaggtttataaacagttatgaggatttctcaggctggtatggggacaccattggtggaataaaagaaataaaaatttggggattagaattatcaaaaacaggtcagtttataaaaaaacaaaaagagataataaagcagaatataagaatgtcgtatttggcaaaggcaaatgaaatttctgaaacagtatttacacaagcaataacatcattaatatatgttattggtggctatttaattataggcaatagtcttactgttggacggttatttgcatttatagcatacagttcctatgttactgggcctatatttgcgattatgaatattggttatagttttgcaggcataatgccatctgcaaaaagatattttgaattcattaatacagaaactgaggatatatgcagaaattatatatcaaaaaaattaaattcaagcgaagttttaggaaacattgaatttaaaaatgttgaattttcgtataatgataaggaatgtgtattaaagaatattagctttaaaataaatgctggggagaaggttgctataattggaagtaacggttcaggtaaaacaacggttataaatctgattttaagattcttaactcctgattctggcagcatactcttggatggtaacgatattaattcttttaaattaaaggactatagaaaattaatatccgtggtaagccaagacgtgtatttatttaatagtagcataagggaaaatattatgcttaactccaagaaaacagatattgagatgaattcagcagtaaaaaaaagtggagcatatagatttatcgaagaaatgcctgacaaatatgaaagtattgtagggcaaagaggaggcacattatctggtggtgaaagacaaaaaatagctatggctagagcttttataagagattctaagatattagtattggatgaagccacagctaactatgatatggaagctgaatatcaagtaaataatataattaaagagagttataaagataaaacaattattataataagccataagccagatatactggcaaaggtagataaaattatagttattaacaatggagtaatagaagatatcggaaatcatatagatttatataatagaagtgaattttataggctgatggtaaatataccattagatgagattatctaattgctattaacatccatttcttagttctcgagaaagatattggatgataatataaatatttaataaataatttaaactatgagggaggattttaaaatgagaaaattaggaaaaaagaattatgaaattattgaaacagtagaggcatatgaggatgactgttatgcgcagcaagattgttacaaaagctgtaaagatagggtagctcgtaaatcattaaatgacaaattatttaatgaggcacactacggcgacggcggttttcattggtaatcgcaaacacagatttagttaattattattaaaaattaaaataaagcgtaggataagaaatttctaacctacgctttattagtagattatatttgaagaaggggatgatgtatatgaatagcaaaccattaattaagctttttagaacaaatgataagtattatatgtacgatacaaataaaaacactatcctaaatattagtaataaacaatacaattctttagaaaattatatgaaagacgatatcgatcattatatagattcagaggaaataaatgaattttataaggaaggctttctatcttcaaatagagtaaaagatatagagagtccttataatggggttctgccatcttatttagatagtaatgtaggaatgataatactacaggtaactcaacagtgcaattttagatgtgaatattgtgtttattcaggtaactacttaaatagaactcactcaagtaaaaaaatggatatttcaatggcatttaaaggtattgattttctcattaatcattcaagaaatcttagtaaaattgatgtatctttttatggaggagaacctcttcttgaatttgattttattaaacaatgcattgattatgctgaaaaaaaagcggaaggcaaaaaggtaacgttttatatgaccacaaatggttctctattaactgatgaggttgtagagtttttatataaacatgatgtgatgttgacaattagtcttgatgggccaaaggaaatacatgataagcatagaaagtttgctttcaataattgtggaacttttgataaggttattaaaaatgttatgaatattgaaaagaagtttccacaatatatcaataatattctttttaatgtagttattgatactcaaaatgatttttcttgtatagataaatttttcctagattatgagagtataaaagatatagatatgatatctggggtaatatctggtaacaatataaaatctattattgaaatgaatgaagattattatttaaaagtagaatatgaattatttagaattttctattatttattacggaaacataatacaaagaattgctctagaatagtaattgaaagatattctcaaatattaaaactttcggaagaattgatgcctcaaaaaatgttatctgaaaaagcacatcctagtggaccgtgtattcctggtgctcaaagattatttatgaatgtagatggttttttctatccatgtgagagggttagtgaaacttctgaacttatgcagataggacatatagatacaggttttgatataaaaaaagtaacaagtatttttaatattggtaagctaaatgaggatgattgtaaaaattgttgggctataagactttgcggtgtgtgcgctggtgcgttagatatggatactgatgaaaaagagttttcaaaaaagaaaagagaagaatgttgtaagaatgttaaagcatctttagaagaaaaatttaaaaattattgttttttaaaggaatttggtcatagttttgacaaaaacgaagaaatgacagtatttaatgactaattagaaatggggatgataaaaatgaaaaatgagtataaaactatgatatatccatttgatgtggaatctgcaccactaataagacatagtaattttattgataaccataatattgtaaatattatttctccaaatggatggggactttgcggtaaggatgcagggcacactgatggtggacaaccggttggtataattatagatagtgattttgataaagcactagaaaattgcgatacagttttttttactgattctagtatgaaaatagatttgcataaatttgtatatcctaaaattattaaagcagctcaaagttcaaaaaatataatatgtactataaaacttgaaaatgaaattattgataaagtatcaaatatttgcaatcaaaataatatgttttttaagtattttacaaatgaaagtaatagtatgataagccccccaactgaaaaaatttatcaaattaacacacctgtagttttggtatttggtttgagtgaaagaacaaacaagtttgagatacaactaaatttaagagaaaacttagatgagatggggtataaagtatcacaaataggtacacgacattattgtgagttaatgggatttcattcatttcctaaatttatgtatagtaaatctattactgaatcagaaaaggtgattttattcaatcattatattaagaatattgaaagtaaagaagcaccagatgtaatagtaatcggtataccaggtggggcaatgcctattaatcaggaatttacaaatggatttggcataatagcttatgaagtgtcacaagctattatgccagatgttgttgtatttagtacattatatactaatagttcactagaaattttacaattattatctaagtctttcaaatataaattgggatataatatagattgctataatattagcaatacatctttagatcttagagctagtaaatatgaagagtcattacaatatattgtattaaatttagacattataaatgaaaagaaaaagatgtataaagagttagatagacctgtttataatattttaaataaaaatgatgcaaaaagtatgacaaattttttagttaataaattggtagaatatgcggaaaatcaaattatatagtttggaggacatgttgtgaataatttttcagagaatattgatataaatataaaattgaatgagatatttaaggatagatttaatatagacctatttaatgatgaactgaatataaatattgatgataatttattgggaagtaaatttagattagcagcacgaaatctttattatttgctatgtgacattgaaaaagaatttgatattactatttctgaagaggatattgataatattaaatttaatacaataaataatattattaaaattattaataaggaattacaacaaaaagctgtggaaacagtttaaatggtaactgttggaataattgatgatgggattggtattgggttttatgatacatatgacattggacgtagtatagagattacacctgattctatagtacaagatgtggatatatgtaaattgaaaaatgccagtcatgggaccatttgcgctgctatagtaaaaaaatattaccctaaagctatacttaccagcataaaagtgcttaatgataagactcgtaaatgtacaagtaaacaacttataaaagctattgaatggtgtttagataatggtatccaagttgttaatcttagccttggtaccatagattatagggattttgaaataataaaagagacaattaatagagcttgcaataaaggtctaattattgtagctgcatgtaacaatagagatatatttacagtacctgcatctttaagcaatgttattggtgtaaaatgtgagaaaaatagtatcttaaaagaaggagaatatatttttaatttatatcctataagtggaattgaagtaatctcttgcagtcaacatcaattgttagtaagtggttgtgactcaaaaattacaagtaggtgtaatagctatgcagcaccgatgattactgctgaagtttgcaaagtaatggacaaatctcctaatataactttagagcaaataaaacaaaatttatataaaaactcactcaattatatagatgatacaatacaagtaaataattataaaaatatagattgggttagtaatgctacattgctatgtatcaaggaaagaaaatgtatttttgagtcacattatataaatcagattaataattttaaagaaattgaggatataaacgttgatgaatttgatacattaattttattaaatagcatgataaatgattataagaaatttgagcccattatttaccggtttaaaaaaaaacaaaaaagtattgttgttatagatgatgaataccaaggggaaagttataaatatcttaatggtgctgttaaactttggtatccttcaatagtggagcatttttatagggcatctccaccacagcaagagttggatgtgccattaataataatttatgactatacagaaaatgagatgataaaagtattagaaacattaacggttaaatttaggagggatggttattatgcagtaggagcatgtacaaaatcactaggcgttttatatggattggaatatattccttttcgtaaagatagaaactttaaagaaataaaagataagattgaagttttgtataaagtttatgattatgacattatgattctaggattaagcattaatagagacgatactaatataattaaagaaattaatatgtgtttaaatcctgataaagttatttttattggagataatttctcaaacgaaataacgacatgggtagaaaaaaatggcgttgatcagaatttaattataacatcaaaagaaaatattgaaaagtattccgatttgggtcataaaatgtttaaatatacagatatcgagttattatatacgcaaattttgaacatgcttctttgtgaaaatgagaaaacttagtaaaagagagtaatttcaaattcttatgagtttacataatgactcaaacaaattatggggggacaatcaatgaaaaagatttttattaaatatactatttttacacttttagctacagttggtatgacatcaaccgtatttgccacagaaaacgttaatgttgacaattctaataagcaaatgcaagaaattataaataaaagtaaacatgattcagatgaattaattaaaaattgggacaaactaaaagttacggctaaaccggacacatcaaaaagaatgaatagcttagactctgaaggatcactaaatagtgttggaagtgctggtgatatacttgtaactccagccactgtttttggcaatggtcctattacaggacatgctggaatggttgatttaaatcctgatcttacaatagaaagtatgacatctggaggtgttcgtagatatacgaatgattggaaaactagatatactaaagctttatgtgctacagtgaaaaatgctgatcctgaacaagccgtagattatgcaagtagtaaaatcggaagtagttataattacaactttttaaataagtggaaaacagatacattttattgttcacaattagtctggagagcttatatagaacaaggtattgatttagataaagatggtgggaatgctgttttaccaactgatttggttagtgataaaattgatataaattggagaacaaattactaattaattcaatatataattttcttgaaataaaccacttaatggtataaattaattctgtgttaatatgaatattggcataatttaattttaaactatatgtggtttatttagacttgaaattaagagtgggagataaataatgtataaaaataaaaaagtatatttctttttattaataattataatgttaagcttaagtttaagttctgaagtattaaatgatcaaggattaaaaaaaatatatattatatattctgactctattcaagcagatagcgaaattgtgagtttagataaaaatttaaatacaagaagcaatattcagatacctgcaagagatatagtgacaagctgtaatgaaaaaggtactgtattattgccaacatcatcggataacaaattatttaaaattgataaaagcgaaactgttaaatcatctgaaactgatttgggtggggattacataaaatataaaaataatgaacaattaactttatataatgtatctttagaatataatagaattaatttcatatgctcagactcgcagataaagtcacttgatatcaaagactcattgttgttatctgctgattttgatgataaaaatatttacgtattaggttataaatttgataaaaataaggaaggtgatacctttctatttattatagataaaagtgagtttaaaattaaagatgaaattaaactaatgaaaaatatgcgggtatatgatacttcgctaattgatgacaaactttttattggagtagatagaaaggtagattttttattatattatgatgtgaaaagatctactctaaataagattgaatacaaagattatctaaaagaaggtacaatggatactaaaaagattctttatagtgataaatatattttttacatatcattagatggtaatatactacaattaaataaggcgagtttggatatcgtgagaaacattaaattgaataataaagtaattttaagtgcttgtttagataaagataaactatattctctaagtgtagatataaataaaaataatcaaattggtttagttgatgtatttgattgtgataatcttgataatataaataatctttcagtggggccaataagaaatacaactccacgagatattttaatattagaataataattaaaggagatataataaatgaaaaaaatatttttaactgtattaccaagtttattaacatatttatttatatatgtagactctcgttttccatatagtaaatgtatattaattggtatttatattttatttcctattatgtttatcactcaaactgtcatttcttcaaaatcagtaaaaaatatgttaattggattgctattattatcgctgtcgattatattacctattaataaatggtataaaatgagcagcatgatgccagccataatagtttatctactattagctggaataacatattttttaataagaactgtgaattttattaaaagaaagagtaaaaaacaaatctaatacaagtttttaatattcaacttataaaaatactatgaaattcatatttatggagcaattaatatatatgtgacatattattagaagttgggcagaaaaaggtaaatctcatgtttacagcatatacatagattattatgtggttattatataaatagcatcagaaaatactaagtatactacgactcaaatagggggactttcattattttgttagaagtttttagtatattaacgtgagttcgatagaaaaatttaagggataaaaaatcccatcaaaatgttttattatataagtgcgaccaaataaataaaacaaaggatgggattttatgcaaaacttattagtagaaatattttatgatgtagacaatt

SEQ ID NO: 153 - DNA, 9319 bp, Clostridium beijerinckii
atcatttagtgatattagttatagttaagtataaagcgtgtgtagggaaattctaaaaatatgatgtaaaataatggataataaattaaataaaattcttgccaacttttacttgactcaaacaatatatatttgaatttagcatcattgataatattctgatataatagatatatatgttttgggaggtaaataataatctgggaaggaggaaagtattgaattgtgctgctttataacataatattaacaaaaattattccaatgggattcatatgaagaaagaagggatttattgatgagaaacgttattagaaatctattacttggattaataataatatcagcaataatgggacaacctgtttttgcagcagataatgatttaaactcatatgtatataaccatttagaaaattgggacacagagtttcaaattgattattataaatctgatgtattagaagtggtacaaaatattgcaaaagatgatgattacttaatgagatcactagagaaaatggtctatgaaagagttggagataaagcaacattaaaggttacttatagaacaactaaagatcaagagttatatattaatcaagagctaactaaaatagttaattctataactaccaatggaatgagcgattttgataaggttaaggcaataaatgaatatttaataaatagatttgaatatgatgatagtcttgtatctaataatgcctattctgcattgacaactggaaaaactacatgtcaaggttatgccatgactgcttataaaatgcttaaattagcaggtgtagagaataaaattattattggaaatttagatggcgttcctcatggatggaacttagttaaattaaataataagtggtaccatttagatgtcacaaataatgatgcattaggaaataataaatattttctaagacaagataaggttctaaaaaatgatggatttacatggaaagaaagtgattatccagaatgctctgaggattataattatgagaataataaggcaagcagttatgctggattattatctgagcttaagtcaaataaagatggtaagtggaatttagttaattctgcgtggtgttttatggaaaacacaggacgttatgcaactggatggaatataatagataataattggtattacttaggcaatgatggcataatgaaaacaggatggatatactctaatggaaaatggtattattgttatcctggaagcggggctatggctcttaattccgttattgatggaaaatatagagttgattcaaatggagcatggatatcatagctgtagcaattaaacaataaagtttatattgacaaaagcttaagttttttgtacaatttaaacaatttaatatatcgcataataaggaaagtaatttattatatttctttattctagattttcaataaaagcaatgaaaagaataagtagaaattagtgatgccatacagaaagttaccggttgatgagaggtgcatggaagctggttttgaatacatcttagagcttcaagctgaaaaaagtttcttttgagtaggtgatgacggaaccctgcacccgttatagtgctaaagtataaccaaaattttggcgtacttgaagaggttaatcgtgtgagcgattaatgaattaaggtggtaacacgggagttatactcttgtcctttatattttaaaggacaagagtttttttgttgcaaatattgaatcttgtaacgcttacttatattaaaaataagaaatatttaggagttaagaagatgagaaagaatactgaagaacaaattaaaattataaggaaaggagttgcagacataattagcattgatgatttggagaaaaagattattaagtcggcaaaagaagataaacctttaataattaagttaggtttagatccaactgcgccagacatccatttaggtcatgcggttgtattaagaaagattaagcaaatgcaagatttagggcatcgagcagttataataattggggattttactggtaaaataggagatccaaccggaaaatctaaaactaggaagcctctgaccaaagaagaagtagtagaaaatgcattaacgtatcaaaagcaaattttcaaaattttagatagagataaaacagaaattaagtttaatagtgaatggttatctgaactgtcatttgaagaagttttaaaactggctgcgactacaacagttgcaagaatgctagaaagagaagattttaaaaagagatataattctaatactcctattggaattcatgaatttttttatcctctaatgcaaggttacgattctatcgcattaaaggcggatatagaattaggaggaactgatcagacatttaatattcttatggggagaacattacaaaaaaatgctggaatggagcaacaaacagcaatatttatgcctatattagaaggactggatggaaaggaaaaaatgagtaagagtttaggaaattatataggaatacaagaatcagcagaaataatgtttaagaaagtaatggaaattcctgatgatttaattataaaatattacgaacttgctaccgatgagcatccagataaaattagaggaattaaagaagagttggataatggcaaaaatccaagagatgtcaaatttgagcttgcaaaaattataacaagattatatcacacagaagaagaaagtaaattcgcacttgaatattttgaaaatgtatttaaaaataaaaatatacctgatgaggtgcctgaaataaatatatcttctgaatgtagcttgttagaagatgttggaaaagttcttgttaaaagtaacttaataaaatcctataatgaatttaaaaggcttttaagtcaaggtggagtatatgtaaatatgcaaaaagtatctgattttaacaatataataattaaaaatggagatataataaagttaggcaagaagaagtttgttaaaatagtaaagtagctaaaagtgtattaaaagaattaaatgaaagaatatatactatattaaaagaggcactcaattgaactgcctcttttaataaattaattcataaagaattatgactgcttttgcttttctatgtaattttcgtaccaattattaaatagaactttaaatgaagcagcaactggcacagcaaggagcattcctaataacccgcctacattgccaccaattagtatagccatcattgtaaataccgcatgtaaacctacactatttccaacaattttaggggctagaagattattatcaatttgttgtacaactagcatagcaactatggcgtaaactattcttataggtgtaccacttaaaagtcccataatagcagcaagaatagtgccaataattgggcctacatatggaatcatattgcttattcctgcaattataccaattacaaaagcgtaatctattccaacaattgaaagtgctatcgctgataaaactccaacgaaaaaagcttccagcaattgaccgcgcaggtacttagcaaagacttcatgaacaactctaaaaacgtaaataattttattgcctaaaatacttttaccaaatactaaataataaagcttattccatagtgctataaaatattcagaatcctttagaagatatatactgattacaagtgcaataaaaaatgttgcaacaccacttccaattgacattatatatgatgtcatatttcctaagttgctttcaacatatctttgtaaatatataattccgctaataatataaggttttatattatctataaaagaattatccagcctatctaaagtcccttttatggattcagttgaaaaggaattactctttaagtatagggaaatgtgttgagtcatatttataatagtagtattatttgatatctgaccgcctatcataaaatagattcctaagattaagcctgaaaatataccaataattaagacatatgtaatcataattgctataattcttcgagtagatgccttctctaatttatatagtctgttctgctttagaaaagtttcaatgcctctagttataggatataaaagatatgctattatgataccgaaaatcagcggcttaattaaattagttaaataccctagaaagtcaaatgcagatctaaataataatcccatatttaaaataattaaaaatgctatatatagtataactgctgtaataactatatatatggaatacttgaataattttttatcaaattcaattttcatataacggtactatctccttattttactttaacttaatttactattatatgaattatatcatattttaaagcaaatatatcatataaatatttaagtaaaacctataatgggataatagataactttttgttgaaacatttcttaaagttttcatccatttctacaggtaaactatcttgcatgtatttaacactactctttggaagtgttaacttaaaagtatctttctggtttataattgtgacttcggataagctattataaaaatacttatcaattttatgagcaagacataatattattgaaatttttttgcatattagaatctcctcttttctaaggatatttttatattcatctgataatttgtaatcaaatttaccgcttagtgctatggcgtaaccaagcattaatatttgtttatgtgtaagtcctgaaattaaggagttaattattatatataagctgtgtttataagcatgttttatggaaatacttatccccaaatcatgcaatttagctgctgcaccaagaagtttatattctaattctaaaaattcataatttggtttttcaaggtatttaaaaaatacaagagatagatcacgtattttttcagcatgtgaaatatttaagtcattatttgttaaaatattgttcaatgaataatctaaaatatcaagattatcaagatctttattcaagagtttttcgtataaaacaccttcacggattccatattgactaattctaaaagcaggacaattgcaatagttcataagcattacaagtgccgagaaaggtgcggtaaatatgtcagatctttctctaggtaatccctttaattttgccttttggttcgtattaagattgagaacatattcatgaattattttaacttcatcaaaaagcatagtataattatggagcagatcgagtggatatttaataaatttcttgtgaattttaccaatcgaacgagctgttccgccaattcctattaaaggcaaattttgagcaagctttaaccaaggtaacttatcaaattcattaaatataaatttattaaatgctgaaatagtatttttgtctgctggcacatcaaaaggaaatagcttagttagtggtatggatccgagaggtaaacttactccattaagtatttttttatctttcattaaagtgatttccatgcttgaaccgccaatatcaataagtaaagcatcctttatatccatggtagctttgattgttatatatccataagctgattcttcaattccactaagaattctaatatctaatttagtcttcttttttaccaaagataaaatatgatctctattttttgcacgtctgattgcctcagtagcaactacaattatttcgactacatcatttttctcgcataaaatcttgaagaattctaaagtaattaacaacttacctattccttcatttgataaattgtcattttcatcaataaactgaccaagtcttgtcattcttttttcttcatcaattattttaaatgaattattcttatatatttcatatactagaaccctcattgaattggaacctatatcaataactgcgatatttttcattgttcactcctcctctatataaaaatatgataaaaagttaacttgtatataataacattttaacttaaagttaacaaaaatattagattatattagtatacatttaaatatattacattattcaatgtgtatttaaaatactatatttacaaataattaaattaagttgaaaatgattagcttataggatgaggagaataattatggatgaaaattatacatatgataattacgaaaatttttttaatcgtgaacttagttggttggaatttaatcaacgagttttagatgaagctaaggataatacgaaccccttattagaacgattaaaatttttatccatatcaagttccaatctcgatgaattttttatggtgagaattggatcattatatagtcaaattcaagccggatttgatgaaagagaagtttctggcttaacaccaagtgaacagattagtaaaatactttatagagttagggagatggttaaggaccaatatcatacatatgatcatttatatgaccacttaggttccagaaatataagaattttcacgtatgatatgttaaatgaagaacaattagaatttataaatgactattataaaaatatattatatccagttttaacacctatggtaattgattcaggcagaccatttcctttgttgttaaataaaacattaaatataggtgttatattaaaagaaagtaagagtgaacaagaattgtttgctacaattcaagtaccatcagttttagggagattagttcctatgccaggagggataggtgaaaactttgtattattggaagatgtcataaaaaaccacttaaaggaattgtttggatttaaagtattaacaacagcgtgctatagaataactaaaaatgcagatttaagtttaaatgaagaaggagcagaagatttgcttgaaacaatagaagaatctcttaagcagagaaggtgggggcttgccgtaagattagaaattgaagaaacaaatgataccaggatcataaataaattagaacaagaatttgaaatttcggaggatcaaatatcttgtataaaagggccaattgatttaacatttataaataaattatatagtattaagggatatagtgaacttaagtttgagcaaataaagagtctgcaagttaaggaattacaagaagaggatatatttcaagaaataagcaagaaggatatttttctacaccacccatatgaaagtttttcattagtagtaaaattagtagaaactgctgctcaggacgaaaaagtactagctataaagcaaaccctatacagagtaagtgggaattcacctataatagctgctctttcaaaagcagcagaaaacggaaagcaggtaacagtattagttgaacttaaagctaggtttgacgaagaaaataacattcattgggcaaggcagcttgaaaaggcgggatgtcatgttatatatggtgtgattggattaaaaactcatagtaaaatattattgattgttagaaaagaaaaaaaaggtattaaaagatatgttcatttaggaactggaaattataatgatgtaacagctaaattctatacagacattgggataataacatcaaagcctgaatatggagaagatgcatcagttatatttaatatgctttcaggatattttaaacctgaaaatatgagtaaaataactattgcaccgtacggattacgaaaaaagttggagcatctagttgaaagagaaactgagcatgctaaaaatggaaagaaagcaaaaataattgcaaaaatgaattcgttagttgatagaaaacttatgatagctttatataaggcatcacaagctggagttaaagtagaacttatagttagaggaatttgctcattaagacctggagttaaaggcttaagtgataatataacagtgagaagtattgtaggaagatatttggaacacagcagaatatattatttttataataatggaaaagaagacacatatatatcaagtgctgactggatgtataggaatttagacaaaagagttgaaactatgacagtaatagaagataatcttataaaaaaggaacttaaagaaatgcttgaattatatataaaagataatgttaaaagtaggatattgctagaagatggttcttatacaaaaattaaaagtgaaggtaaaattgttaatgcacagaaggatatgatagagatttgtaaaaagtttaatcagaaaagttagatgaatatatgatttaaataaatatgttatatgttgagcagaagtgatataagcaaataaaattcgatagaatttaataattaggattcttgaaaatggaaattagcttaagtagtgttaaatagagataaaaaaggctaaagtgttaatagctataatcgataattaattataagaatataattgagacataaatattaaattacattaaatattctaggagatgagcaaaatgaagaataacaaattaagaattttatctttagccttattagcattcctagctcaaggatcttgtacttatgcagcaagttcggataagagcgattatactaaagatgaattaaacaatttaactccaggatgggatgcaaaagacatagacaaaagtaactataaagttgattcctataaaaactcattttcaagtacgcagaccccagatgcaaaggataaggatactagtgatacaacaagtaaagacaatacttcaagtgcaacaactgctgtagacacaagtgtaggaaatgctatcgtaagcagttcaccgagcacaggaaacagaggagatttttggggaaagacttcagatggaaaatggatattgattgaacaaggtgttccagtaagtggttggaaaatggtaagaggacaatggtattacatggattctaatggagtaatgcagactggatggataaacgatggaaacaactggtattatttaaattcagatggatctatggcatataatacgtatgtaggcggttattatcttgattggaacggtgttatgcaataatctattaaaaaataaattgttataagtaatttctaggcaaaacttatgtttggtttaatcaatcaagctgtgagttttgtcttttttattttgaatagaaaagagttgaatcttaatatttaacaagcaaggtataataatttatcttaaatggaaaaatgaaagatgataaaattattatttataaaatgataaaagataatgacatttaaaattttaaacataataaatatagttaagtgcaagaagttagtttttcattttaccaaaataataaatatatatacttgacataaagttaactctaaggtgtaaaatttataggaaaggttcatattcatggatttattac

SEQ ID NO: 154 - DNA, 9240 bp, Clostridium beijerinckii
ttcctttttcctgatcataatctgctatagttaaaggaattctttcacctttttcatcattttttatgataataaattgtccaggctttgcagattttgctactcttggagcttctatatccattgagaatatattatttgttagctcctttttgttcactattttatacatgccatcgcaccccttttaattatgttaagttttatcacttaatatatagtttacactattattctgaatttttaaaatactttttatgaattctcatatatttctacttatctataggacctatgttactacttaatactgatgattctcgagcattttctaatgatatccctgtgcatctaaatttatcactgatatctacattaagtttctcataataaaaaagctgatattaatatttctaactatcaaaactcaataaaaaatgataataaaccttaattttataaagatctattatcatcattgtaatcttatttatttttaatatgtacttctattcaatcctaaatatatttctagggaaatattcgctatgtatactaaatattatacaaaattctttataggaaatactattttaaattcagtaactgcatcgctacttttcacatatatcttaccattatgactctccactaaatcctttacaatacttaacccgtatccatgactttgatcattattttccttcgtagtaaatccaactttaaatatatcatttagatgttgttctagaattctaggaccattattctctattctcactattacatttcctaaatattcataagcctttgcaattattatacctttgccgttcattgcttttattgcattatttactatattagatactattctataaaactccatttcagtaatactcactaaagagaaatcacaattttcttctattattacatgtattcccatatcaatagccggttttaatgcaagggataatatagaatttctattctcgctaacttctacagctgttggcgtagattcattcttatttataatatcttttagagatttttttaaatcatcgaatctttccattagacaaagtccatatagatacgatatctgcgctccgtagtcatgcttaatcttcctaagttcactatttttttcttctagagcttcatttaatttaaatatttgatctgatttcttctttatatttgcaaaatattttatgataaacgctaaaaatacgcacaagattgtgattatcatattttttaacattttagattcatcattataaattattaaataaaaggccaaaacgaaatctagacagaagcttattgttataatcacgatcatattaatcttttcactaaccgccagcttgtacatctctataaacttgcccatgtattttatacataagtataagaataaaatataaggaacatatataattaaaatattagctacatctgcatattctactggtatcagaccttctataaaaccaaaaaataaattatatgatataattccatatacgcccataaaagaatatgtcaatgtatagggaatcattgactttagtttgttatctttatatgagaaaatcattacaactaaacatgatatatgtattataaacacacagatagatatgtttccaaatatacttgtaaagctactgtttataataaacgtaactatggttattaaaactactttaagtttgtttaatttcttttcactcttcaagcagcattctgttgaatacgcgaaaattatagcttgaatcatagagactattatatctgccaataaacgcaccaaaaattcctccttaaatttacgtgaaagtgacttatctcaattttttcatagattcaggcatttcttcaattcctgctgtagctgctgatgctggagcaaatataatcattgaaagtgataacatcattaataccttacctaataaatttttaattttcataaaatccattcccctttcaattttgcttaaaatttatcattaatatttcaaaacattaagcatcttttttattaaacattaatatggtgttaaataggattgtccatgttataagcgaataatagttgctaaaattgtacagacatatagatgttataccaagcattgttgcaatacttagacctcttattctgtttttatttattaattcttggcgcgtaattggcattttaggatttattattggaacttgatgccataggcaaaatatacttaagataattagtatacagttacctacaaatgagagagtgcactgagaatttaacaccaatattccaattgctaatagcactgtggctataaaacacttaacctgagtatcttcatggtatccgcctataaaaatcttagtcatactcatgactgctaaaattataataattttgtcgaaatatccaaacaatgaaaatataactataacagaaaatagctttatcgtctcaaataaaatactaactagaatatattccatttgttctagttggtctttactatagttatcatttgtagatatgctatttataattttttttgaaatactctttaccatatttatctctctttttatatatttttctatatgttaaatatattatagtcccttatttgctaattttcaacatatatttattcatctccaagtcgttaataagcataatttgtaaaaatatttttccaacattaattagatgattattataaaaaaagtgccttaataagtaactattaataggatgctttttctttaatatattataaatattaatttagtcttaagtataattttatatactaatgcaaaaatcggtatttttctacatttaaaatttaaatatgattaaatatatattcaaattaatttataattatatatatctctattttaatttaatgaattgtatatataccttttattcataggaatattttcacttcagtctcagcactgtattcttactacatacttttctattacctcttctcattttgaaatactatggtaaattctgcatgaacttattgtactgaacattgaacaatgttagtataatactgttcaataattgaactcatttatatgaataaaacatttcttatttttattcaatttaataaatttcaggaggagagaattatggaagatatgtcttattggaaagaagtttgggaaagaaaaggaaatggaaatactacatgtttagaggaattagacggatacgaagatactactgctgatgtaaaagaaatagctaaacaaattgttaaagaattagacattaaggaaacagatagaatattagaagttgcctgcggagcaggtggactagctcaatatataaaatgtggtgaatacgtaggagtagattattcctcttctcttgtaaaaaggcacatagaattacttaacaattcagttcttcacggagaagcaaataatctaatctttaaagataaaacttttgataaagtattttgctttggagcatttcactattttcctaatcaagagtatgctaaacaagcaatttcagaattgaaaagagttgctaaggaggctatatttattggagacctacctatgacttcacacagaaaagagcacttactttatgataaaaatgactttaaagactggaaaataactgatggatattataatccatgcaggttcaatgtatctctaaaattagtttaattgataagtaaagacaggtatctctcaatacctgtccatttaccttgttcctgatgaaccaaatccattctgatttctttcactttcagatagttcttctatttctattatgtcaactttaactacaggttttataaccatttgagctattttcattcctggttccactttgaaaacttcgcttccatgattaattagaataacacctatttctcctctgtacccttcatctatagtacctggagaatttaacgtagttataccattttttaatgcaagaccgcttcttggtcttatttgagcttcagtatttttagggagttcaatttgtattcctgtatgtactaatcctctttctcccggctttaaagttaattctttaactgcatataggtctaatccagcatcaccttcatgagcataattaggtatcacagctttatcatcgattttttttatttttaaaatataattgtccattctaacacctacttaaagattatataatattatgattatataattttccaatacaaaaatccacttcttttatttaaattaaagtattctataatttttattacttaattaaacatatgcaaaaggttatatttacgaataaattaatttattttttaaatataaccttcattctttatttaattcttatatttgttttgtgccataaattttttaaatttattaactactactattttttgtttcttattagtattgtctattattatttcgttccaatttatatacttaggtttttcaaagtatcttttatcaataatctcaattatcctataacagccttcctcaactccagaaaaaataacttttccttcctcatctgtaactttcgatttaacaagaacaggagataatccatttattttatataaattaatttttacaccttttaaatattcgtgttcttcacattccaaaattgatgtaacaataatttcccctccattacaatctttttcttctactctttggggacttgcagatttctcatttaatatgaactctttattatctcttttctccttattatcatcggatatttcaaatttataattggtattattttctacagatactatatcattaatattttctttttcataatttctaggaacagtatcactcataaaaagctcctcttaaaaattggttctctttatataatatgataaataaacttttatgtgattatgaattgaaaacattctaaaatgtattgttagtttaaccaagaaaaatagaactacctatttctattaaaaaattcagcacattatagtcattacaaataaattctttctcatttactgaaattgaaaggtatataactgccaatagctctccgttacaaattattggagctatacagactgatttccagtcaggaagcccataactattgtgactgtccatgctctcccaatctactaaatataaacctttttcttcttcaatgacttgatttactaatttaaaattaaacctatcatctaaattccaattatccttatttcttctcttactatacgtattaactattttcttctcttttacaataaaaattgtagctatatcacactcaatcgtctgcataatctttaaaataagattataaatcttttcttccttactacatctacgtttggcaataccagctatttctttgagcattaacataaaattataatctttagccgcatttcctgataatactccagttaattcgtcatttgtatttccacttgctccacactcattttcccaaacgatgcatctattcttaccatcacgtttagccttatatagagcctggtcagctctccttataatttcttcattgttaagagattcataagaactcattgctattcctatgcttacagtcacttttcttttatctcctagaatccttgcttcctctatattttttcttattatctcccctaaatttatagctgcttcacaattaacattaggcaagagaattataaattcctctcctccatatcttccaataatatcacctttgctcatgcactttttaacttcatctgcaaccttaactaagacttcatctccagtttgatgtccatacttgtcatttacgcctttaaaatcgtcgatatcaaacatcattacagcaaattcactttctcttgccttcgcagaatctaataaaaaaagtaacgcttcttcaaaatattttctattataaacacctgtcagcttgtctagtgtagagcttattgtaagattatacttttctaataaaaaggttaagaaaggtttaaatttctctattgttttctttgattcattatttatataatttaatgcattgttagtaataaatattaatcttgcattaattcccgcactactatttatgtgtttttctctatttattattttcatatacatacaagatcttattccatctttcagtaccttatcatctaactgatagaatctagggtcattactgcaaattgcgaatgtatcttcatctgaatcaacttttagtgagaggtatctatttatttcatttttatcgctaattctatatgtgcatataacatcattttctccctgctcgttctctgtaacaatcatagccttatctgctaaaattaatctcgccatatacttcattacattttttatatcatcaatagtattattagaaaactgctcaaatactttatatatatctctaaaatcattgtaatagcatttttcatataaatattgaaccaatttaaatgtatcttcattatctagtatattcattaaatctagttcttttaatatttgttctaaatcctcaattgtttttatgaattgtgttgatttaaaactcatatttatacccaaatcttcatttaagcattttacaaataacttacgggtttctaaaaacctactattatttgcatatgataacttatcattttgcggtaataaatttattgtatctatatatgaagctatagattcataataataattcaatgccaatccattacattcgagttcattatacttctcaccaatcgcagaatatatatcagctttaatttcctggttatccacaaaggagcatactcttagcgccttatttatcagaaaattatattgatttctatttctaaaattaagttctagatacacataaattccttcaacattgtaatttttaggatatcccttgagatcaaagaataattctttagccaacaccttatatccaagtgttaaaattcttctaatagcacttatccttatttcaagacatgtatctgcatcctgtaatagcttaatttttttctctaacttattgtatacatttcttatatcactctcatttttacatttatataaaataagctcaaagtaattgcaaacaactattttatacttagaactattgctattaaatattagggcatatatttttttcaagtggtcatatgctaaatcataattacaaatcatcagattatataacgcatatgtatagtttgtatttataattctatcttccaatagctttaatcctttttgcatttgcattattaaattatgatactttactaccagacttatctttcctgattttatatataacaaacaaagttcattgcaaatattaaatgaataagagtctatcccctcttctctttctctttctagtgctcttaatagatatttctctgcttctaaatatcttttttcctgactataaatatctgctatacaaattagactcaatatttccctcttgtatactttctgtttattcccttctctagctatttctaaatattgctctaaaatctccttgttatctcttccttcttccttacagacagatgcatctaatagtttaatatataattgaccattaatattattgttattagtaaatatactgtttgcatataaacataaatttttagcctctttataattccctttctttatatatatattaataagaatacttactgcccagccatatacatcctcttttatcttattttcttcacatataattattgctttttgtgcattaagcaacgttaatttattgttatattccaatctgtattttaatgaaagtgcatagtaataataaacctctcccttaggatagtgttctttatctagcaatcttcgtatacaatttaaagaataatctatccctgtatctatatctgtaatactattaatttttattattatcatttcaagcagtgtatatatttcaatttcaatttcgtcattttgtattgcgatctggtttgccttctcaagatattcaaaacttttttcatggttagattttttttcataaagctttgcaatcttaatggccacttcacttccacttgaatcactaggatatgttaataccttcttataatatgatattgacttcgatatatcacctaacagatcctgagcttctgcgtattttaatgtataaaaatatgctttttcgtaaccattacttttttctaaatgcaataataattcttctatataataatctgtatcaagtagaattttctccataaaaatagatgccttagagtgtagtttaattctttcttcttcacctaactttaaatacaatatatttcttaataaattatttctaaaacctataagtataccttgatcacttattttatcagtcaaaaggccttttgattttaaattctcataaatttctacattatcagaatccattattacatattctaaaattattttttctgataaaggagttttaaatatagctaactcctttaaaatattaatttctttttcgtttaatgaaaaaatacttgcctctaatcttctttctaaagatttgggtataagtatatcttgaaccttaatattagtcttccattctccattattgctatcaaaatataaggttccattaccgtataattcatttataactccacttatatactgcggatttcctagagtttctgaatatatctttaccgctaacttattaacatcagtacctgtattaagcatacttctaatcatcttagtagtattatattgattaaaataatttattttatattcttcatacttctctacttgttttagttcatttatgaactttataaaattttcatcaacactgctttcattcatagaaaatattatcataacattttctaagttatttcttaaaaagattatatatttaataaacagtttgaaaacttcattttttttatctaaatcatctattatcattataaatggcttagtcattgtatactcacttataaacttccccattctattaatcaattgaagcttttgtttattattttcactatttgtagaatttttttcaagtaatatagaaataaatttttttatataaatttcatacttatctctcaaattcttaac

SEQ ID NO: 155 - DNA, 9127 bp, Clostridium beijerinckii
gtgtcaagactaccaaataattatttacatataaaaatatacctaacagagaatttaaacctttctgttgggtatattttatcacttaaattgcgctatcgctacgcgtcgattctttgacgcttacaattaaacaggtagaaaatagtataaaaaccactgtatatataaattctaacattagtggttctttttttatttctatctattaactaaaatatattttgtaagaatacttaaattagtttataatcaatagcgattaaagatactaaacatagtttttaatataaataataattgtgaggtgtaggcaaatgcaaaagatacttaggcctgtatatgcagaaatagatttagatgcaatagcttataatataaaaaatataaagaagttagtgaaagataaagagataatcgcagtcgttaaagcggattgttatggtcatggagctttagatgtggttccaactttacttgaaaatggtgcatcaagacttgccgtagcagtactaacagaaggaattgaactcagaaatgataatataaaagcccctattatgatactcggatataccccttcgtatctaaatgaagaattaataaaatatgatcttgaacaaactgtatacgacttagattatgcgaaagaattatcaaaaacagcattaagccttaataaaaaagctaaaattcacatagcgattgatactggaatgggaagaataggatttctaccaactgaaaaagcaatagatgctatttgtaaaatctgttctttagaaggactagaagtaatcggaatatttactcatttttctacttctgatgagaaggataaagaatatactaatgaacaatttgaaaaatttacggatttgctaaagaaactttcaaatcttaatatagaaattcctataaaacacgtctctaatagcggtgcaatcatggacatgccagaaacttacctagatgctgtccgtgctggaatcatactttacggatattatccatcacctgaagtaaaaaaagaaaatctttctttaaagccagcattgacattaaaagcaactataacacgtgttcaagaaatggatgcaggtatgtctataagttatggaagaacttttaagactgagcgaaaaagtttaatagctactataccaataggatatgcagatggttattctagattactagctaaaaatgctaaagtcattataaatggacaatttgctcctattgtcggaagaatatgcatggatcaatgtatgatagatattacagatattaatggtgatataaaagttggtgatgaagttataatccttggtgaacaaaatggactcagatttaatgcagataatttcgcagaaataatgggaacaataaattacgaaatactttgcatgcttaaatatagaatcccgagggtttatgttaaaaacggaaaaatatttaatgtaagaaattatctatagattcaatcaactttacttataaaaataaacttgatatttagttatttctaattagttaataagttataaataagctacttctatgtaagcgcaaataacgatgtatatgtaaatatgcatatacatcgctatttatatttattaataaaatcttatattgctagtttcaatgtttatcctataaacattctggcatactaatttcagagaatatcgcctcaaaatataactttaattgactaccttcctatagatcaaggtttataaagggttccttattgaaaatttgaaatatatcaagcagcgaaattttatattcatatggaacaaatatgtattcaatttcggctgatatccatataagttcaactctcatttcagaaccctatattctatccactttaaatacattaaatattcttatttgcttgaatctgccattactttgtcatatttataagcaggcatttatataataaaaattctatttccttctttaatctaactaattcttcggaacttatatttttcaattcatcctttgtattagtgaattcctcacttaattcatcaaataaaactaatacttcttctttacttatttctttcagttcatctaagtattttcttaaagacccttcaatattattagcccaattatctatagcggttacagatatttcatttatctttttctgccatgtcaacgaatcatataaaaagaatattgaatccgtaaaaacatttaaagattcagtaattccctttaaagatgtagcccttattgtttttaataaatgatttaaattattattaacttctccaacagatgatttttcaaatgtattagaaagcttctttaaatttttactaatagcataatccttttctgaattattgaatttacctttatatactgtcctaaacatttctcctgtagctctttcaatagaatcccctctatgcttttctatgatatcttctacaaccttgttatatgaaggtgtacttcttttaacattctcctttagcttaataatttctgcgtttagaatgttctcaacttctctatctaaattaataacttcatcttcaatataggtatttaagttttcagtttcctcgcttgttaactttggaacatagtagtgctgcattaaggtgaaggtttcttccttcattgaccatttgctttcatcgtatatatagttcgtaatattctctttgattttcatatcggattttcctataagccttactgcttttaattttatttttacaaatccgttttctataacatctagtatctcatcttttttatctaagaattccttaattacattagctttttctactacctcttcttttttacattctatttccgcaattctagaactgatttttatatcgcattcacgcaataagtaatcctgataattctttagagtttctgaaagctctccttctttatctgggtcattaacttttttgtatatatagttccagagcttatctgtgtcaggattcttttcaatactactttcaataagaaatgtttctatatctttatggatacattcacaaacgctgtttctaatttcattgattcttttattatccatatctatattttgtgggcacatatttactgcgagtacaacttccacattattgtttataatttcgctaacatactttaaaaactgaaaatcgtcttctccaactccagttttatacgacacaacatatattataaaatcactttctggtataaaattctttaaaacttcttcgtgcctttcaacaagtgatccatatccaggagtatcgaaaatcctcattccagaatatctcgaatctttacatggtccaatatatcttaatctatttatattaccatcgggttttactgtaaaattcgaaaaactatcatcatccaaaacatctatgcttaaatcattatttatagcaaataaggtttcttcagaactctcgtctattataacttctgtgacaattccagttgttggtttaacactctccactagtattttcctttgaaaaatactgtttattaacgcactttttcctgagctagtttcccctagcatgacaatatagtgagctggattaattattctatcctttattaataaattcttcgatgtaatttcatcattatcaagaatattaactaccttatcaatcctgttttgtctatcaacgcagtttttaaaaatattcataatatttatttctccttatattcctcgattaattcccttaatatttttaaatctttttcaaattctaaaatactttcttcgttataagtagtttcatactgtttttccaagtcttccacatcttgtttaaagacattttctaaattagatttcattgcctttatagattcgtctatttccttttgttttgccattaaatctccagttatttcttcttttaaatatatttctaaatcttctatcattggctccaaatcttttaaagtataattagctctactttcaactatttttttcctcatatgatctccaatcaaagaaaaggctaaacttattcccatcccaaccaaaattcctacaggaccaccaagcattcctactgctccaactgtcccaattactccggttgataccccaagtaatgctggaattgacttttcatattttattgaactctttttattaaagaatgatatattctcataggttccattaaaaccttttattcttatattttcaaatctgctatttatattttttataaattcaccaatactgttcaaaatctcatccattatatcatttatcgctttatcggacgtctctttatatattaagctaagtctattgccatcaactattcctttatttataattcttcttaattctactcgtaaattttcaatgttctcttttattactttagatgaattatctataatattattcatttcatcttctgcataagttcgaaaatctcttaattttcttttattctccgataacattgtttttatctctttgattctttcttccttttctaaagtattttgattgtccttatttaatgctaaagttttataagtatttatcctatcattaatgttttctaaaacttcattaactctttggcttaagaccttcattaaatctttattatattcctttgaaatatttttaatttcttctattacattaactattcctgaattattataagctgcttcatctccagtgaatttcccttttacagcctcataaacatttactatatcaacttttatatctctttcttcattatgagaataacttatactacttaatacgccagagttatgttctcttgcctcatttgcatcttcaacactttcatcattccatttattttgaacaaaaatagtattagctaatttaggccacaaagcatttataaagcttttctccgatcttgtaattggtggatttgtcctaattaaaaatattcctgctgttagcttgtctacatattctaaagtagtcttctgattttgtggggtcaaacttccaacaccaggcaaatctacaagtactatatcatcttttaaaacatcgctcttgttatataatactattttcgatactttaagattattggcttcattataatcattatgtacatatttttccaattcttttatgcgtatatgctcttttcttccgtttagataatatactacagcttcatcagtattttctccatatctaacctcaactggtacgcaagttgtttcatcaacatctgtgggtaatacattttcctccattagtatggcatttaaaaaactactctttcctgcaccttgaatccctaaaacaggaaccattatttctttcttattcaaattctcaataaaatgttcaaagtatctgttataatctataccttgcttatcattattaagatatttttctaataagttagaaaacctttcatcttctattaaatttatatatgtcatttcctattatctccttcttccaaaaagcttagaaaagaatgatttatttccccactctacctcttcttgtatataatcaatcttattattaagctcatcttctaatttacttattaattctattatactatctttatcttcaattttactgtcaatatccttaatttttcctaaaattgaatttttattattaattagattatattctatagatttgtctaaagattcaactttattttcaatagatttttcaaccaagtctactttttcttctatcttatctaagttaatattatctaatttatctaaaatcgcttctttattacttgccgcatcttttactacttttaatcctaatattgccaatctttcttctatagattcaaataataccttactttgctcttccacactcttttgtattactgcttccaatttcgtttctgtcatttctcttatctttaatatgcttttatttaaatcttcaagtttttcttcgaattcttcttcatgaaactcttgaaaattttctcgcaagtcatttatttttctctcaactggctttaatttttcagttagctcttctgtcatatttctagatgctcttgtaagtaaacttaacatatcatcctgtatttcgcccattatattttttgtaacttcatcgctttgaattaaaattgatctttcttccatatattcattcatactccttcctctttagaggtattcaaaaaatagcttaaaatcttttcaatagtttcttgttcttctactcctcttgacaaaggattttcaatcagtttttcttttataactttataatcacttatcaaaaattcatgaatttcctgtgattctattaatgccatattatatattggatttttggaattaattaatatatattcaggccttatactactaaacctgctaataactttatcttttaggtttttaacttctatcagaagctcctctatattatttgcatttataaattctctgcatgaatctattactaaattcactgataaattactattttccttaaagaaatagtttaaatttctgctttctaaaatctgcttcttagaatttccaatttgtattccattaaaaataataaacatactataagtcatatcttttatctgtttaagtttttcataaaatttaagcgtaccttttccagattcatagataatagctatatcttcaaaactatataaaccttctctctttattaattcacattcttcaagatctagatcaattccatacattctagaaatgaaatctctgcaagaatctatatcccatgtccaaaaaagctttaggcccatactgttagacttttcttcacactttttatttatatattttccaactaataggtagttcttttctaaaattttattactcagcatataaaagttataatgtaaccttgaaatactgtatgaaatatttttttcataattatcacttattattgctacctcatttttcacatcaactcttaaattagaaagcttgtctttaatacctattagatccttagttacttctcctatatcataaagctctatattttgctcttttttttcttcaaattcttctgttcttcttgatacttcctcatagaaagtatctattgcttttgtatattgattactccattcttttaatatacttatatatttattcttattttcactacatattttttgggccctcttaatagtctcatctttatcaattattctctcgtcatatcctacttctttatatccccagtccttgtcaaatatattagacaataatcttttccccttatttagaaccccttctttcttaaataacacagttctttcttcatatttatgcttaatctcaatatttttactttcgatactcggcaaaacataagaggatcttatatctaaattaagactatcatatattcttcttttatctttttcacacctcttaacagtgcttaaaatatcactttcaatatataaatttttattgttaattctatctactatgtctaaataatcttcaatattttcagatgatacagatgatatttcctttattatatttgaagtaatgttttcaatttctttaatcttttcagctatttcattctgagcagtctcaaatttatttgcaagattatcaagctctttattacttacttttattaaatcttctatttcacctaaattatttccctttataatttcttgatcagttgaaattatgctattaattttttctattagactttcagctctccgtccattaagctttggaatagtattttccgcacaattttctatagcattaataaagatttcaaaattagaattatcatatctttccttatctttatctacaattcccaaaagtccattaagtgctgatatttgaataacttccgatatttctttatcatctgtaatttccattaagagcctctctgctctctttttatacttttttaatatagtaactttatcttcttcaactattccattcctgccaatcttttcttcaattgaatctatcatgttttgtactaggattatctgcttgtctttctcacttactatcttaattttttcagcattcgttgcatcactattagccttaaccgtagtcacaaatatgcatatatctatagttggaagtaatatctccaatgtcaatttttcatgattttctaagttccatgcatctaatcctggactatcgattatatgtattttctcatctaacataaaataaggtgtttttatatcaatctgagtaacattaagcgtatttccaggattcctgctctcatccgcatattctgctatagcatcttcatttagattttccgtctctaatattttaggtccactatccttaaaataaataacggcttgtctctttagtccttttgatgccgtaattataatacttgaactaggccttatagccattggtaaaatcttttcaccaagaagtgcatttactaaagtagattttccactactagttatccccataatagcaattcgtattatattatcatcataaatactttttcgttcttcaaaccatgctatatccttattgtatctattctctctataattatttttacttaaaactcctcttatctcatcaattatattcaatatgtaattatcttttctcataaaactctccataacaactatactaattcatactatatcttccttatatattttcatagttctgataaggcatatgaaataaaataacaaattcaaaatgccatgattatttttcattaggcaaaaaatggactcgacagatgaacttattgtttttttaattatgcctaaatatatcttatcataattaagcatacttatctaagcaaatacttactgaataataaaaatttcacaattttatttccaaattctacacaataatatgtgttgttgctaaaaaacccctattatatattttaacttgtcagatttattattaattaagaatcacttatattaatttgccaaatataaaaacttgaaagaaatatctaagtattctttcaagttttttataaatg

SEQ ID NO: 156 - DNA, 9053 bp, Clostridium beijerinckii
cggagtatcagtgtaaacccttcgggacgttactccgtcatttggtttctcataataacagttctaatttatgaatttaatcatttaattaggctattcttttcaaatagcaacaagtcgcactcttagtataaattggatcgccagttttatctactcctttttcaacttcaatactaagagaaacagagtcaatagttttagttacagccatatatttttacctccttcattttgttttcgtatatgatatacgcattaattccatgagttatataaatatcctaaaatttttttaagcagcaaataataaaaaagttgaagtaaagacacaaagaaaactttatgtagatctataggcgttctaaaaagtttaatccatcagagttttagtggactgccaggaactataaagtaaataattttataaaaaattaatgatgttatttagaatttatatattaaaggaaagtcaattaggtaaaaaagtatttcttagattcagagaaggcatcaccattttactaggagtccttactttgatttaacacgaagagtttaataaatttaatgaatgtgaaaatctttatatagtaataaaatagaaatatgtaaaacaaataaaaataaaatgagagaaaacatttttatttacgttatataaagtgtaagagcttttacgaaaataatggattggagaaatttcaatgaggtgtaccgaaaaaaattatatcagtaggctgaaaaagaggaaagaagatgccatagaatttatagtagataaatatctggcattagttaaatccacagtatataaagtactttcgccacttaacaaggatggaattattgaggagtgtataaatgatgtatttctttcagtatggaataattcagataaatttacaggtgaagaagttgattttaagaaatggatatttaagatagcaagatttaaagctattgattattacaggaaagaagttaagaatttgcatgtaagcatagaggacgaggaaataagcacaaatgaattagtggaagaagaaattattaagctagaagaaagaaatgaattgataaacttaattaacactcttgagcctatggatagggacatatttattatgaagttctttctaggggaaaagtctgaggatattgctagaaagtttggacttaccagagctgcgttagacaatagaatttataggggtaagaaaaaacttagactaaatttggaggtagtataatatgaaagatatttatgaaattctaaatgatatagaaatagatgaagatgaaatggagataatagatgcaactgatattgaaaaagcaaaggtaaaaaagtatttaaagaagtctataaataaagataagtcatatagaaataagggaatagctatagcagttttgtgttgtttgttaattggaggtgcaggaactttgggagtagcctatccatcttatgcagcagaaattccgatagttggagatatatttaggtttatagataatggtagaacaggtgcatatgataaatataaggaatatgcagatgtggtaggggctacacaagaaagtaatggtattaaagtcacaataaaagaagcaatatttgatggaaaaaccttaacttatacttatgaaatagtaagtgataaagatttaggcgataatccattttttaatatgaatggaccaaggattactataaaagattataatggtgggacaggaggaagttctggagtaaaaaaagtcgctgagaatacttatgtaggtgaagaaactattactatagatgaagaaagaaaggctataaactttgaattaaatttcacagatataggcgatatgagctccgaaaattctaaagaaataaatggaaattggaagtttaaaattaatttaaaagcattagataatgttaaacaaatggtaaataagacaactgaaaaaaatggagttcaattaaatatagaaagtatttctaaaacgtcagcaacatttacgttaaattattctcaagaaatttcaaaggatttacaggagaaatactttattgtagatattcctatagaagaagtaaaagatgatttaggaaatgtttataaagcaacaagtgtttcaacaaatgaaggtagtgaaggaagatatgccggaaaatccatgtcaagttttggggagttaaatccaaatgcaactaaattaataataactcctaaagtgcatttatcaaataatgtacatcaagaatcaggtaatggagagggaaaagctgttgatacaagtcctgctatagatgagaatcaccctaaaaataatgaatttgcattagatgatatagtaattgaattaaaaaaatagatacaccttttcttatcagaaatagttcaactaagatataagtagatttaaaggtagtaaaaataaattaatagtagagtataatagatactaaaaaaagttcatcattgttgtatggtgaacttttttattcttcataaaattatagtacggtcaaacctatggatattgtgtcattcgtaagtgtagcttatatattttaaatggtagaatcaatactatattttctcaaatttaattggacgccttaactttcctagagagattagctcagtattctttttatagttatcccaaaggctggcccttttaatattaggattatcataagttttaaagaaatattcacaagtatttgtattaacaaaggcagtatattttgtataatcataagtatctctatttgttattactatcccttttggaatagaaacactttccataatatgaaagcatgtatttattgcttctaaactgtcactaggtgctttaatatgtgttttttgatatgctgttcttacgaatcgttctggagatgtgtagcctccaggtaactgcatagttcctccagcctgaccaaatggccttaaatgaatgttaccccagcatgcatcactagtctgagttggagatacattcatgtaatttcgtaaattagtcatgtgccactgaagatcaggactattggccataactccaattgaatttttgtataaagttagacctctttctgtttgttcaatgacgacacattctccacttttatctgtagcaatccaatgcaaaggagctactgtttgcgttactggatcttcaagacctacaatatctatttccattaatatttctttaagatcttttactgattcacatcttcctaaaatataatgaagaaaatctaatgaggaaacagcttccctggtaatggaatctttatgagtcttgtatttagcataacctgcaaaatataatgctgcagccgcaaatcctttttcatttaccccatcaaagaaaccaagcatttcacctgcttcttgtccaattcctataaagctatagtaatcgcaaattttactcatgttgagagtattattccatacataatttttaggtacaacataaagttctggctcaatatcataagaaaaatccattgttctgccaaaaaaattctccatctttttagattgtagtgttattgctgtgcacattttagttcttatcctccttatactttattaacttagcacttgaaatttatcactaatgtcaacttatatttaatcaatctaaaccataaactgcatgctgcttagaatcttcaacgatattttcatagcttttttgaatcaaaatatttatggtttcggtaagttaccacataaatctagtcttaaattttgatatctatataaaaggtctataatttatagatatacttaaacatggcataaagttccacttattaatgttaaactatgaatggtttagatttaatatcttatgttttgaggaaggataaaaggtatataaaattacaataaactttgtaatgtattgattctagataaatacaaataaagtaaatacaatattaaaatatagattaaggttcaagaagaaatatatgatattttgaatttatatgattttaaattactattttgaataaaaattatgttcctatcggatactatcattataactaatgattatctaaaaataggaggaacaatatgaataaaaattttaaaaggattacaatcttaacgatgctgatagtcagcattttctcatttgcagtgaacaacaatgcaatagcgcaggtaccgtcggataaggataatggagtacatctaattttagactcagttaattataataatgttttaccaaagcacttccgaaaaactactgatttagcagttgtaaaggacaataaagatttggatcttaaggggttagataagctgaatatttctggcagtcaacaattttcagggaataatatagatcttttaacaaaggcaattgatacttctctgcctatgacagtaatagatttaagacaggaatgtcatggattcataaatggatttgcagttagctgggcagatgcaagaaataatgctaatgtaggacttacaagagatcaagttatagctaaagaaaaagaggatttaaaaagtatcaaattaaatgaacctataactttttataataactctaaacaaaccatggatgttaaaacagttcaaagcgaagaagaacttactaaatcaaaaaatttaggatatgaaagagtaacagttagagatggtggaatacctactgatgatatggttgattattttatggaattcataaaaaataaaccaaaagattcttggcttcactttcattgcaaagagggtataggaagaacatctactttcatgataatgtacgacatgattaataattataaagatgtcaatgctgatggcataattaaaagacaattggcattagcaaattttgaggatactacattaaagtctttttataataacgaaagaatgggattcttaaataaattttatgattactgcaaagctaacggagactcatttgatactaaatggagtgagtggaatagtaaagcttcgagtatggatgaaacagataaatctaatgctatccaggtatcaaatgtaaattctgtttatatgaaaaataatataatgcctaaatctttatatgcgatttctttagattctatgacacctggtgaaagaacaatgataactagccttcaggggctagttaataatcattgttcttttcaaatatatacacttaattcttctcagcctgattataaaatatggttggaagatttaaaaagtagtcataatgtaccttatgaaatgatatcagatccttgggagctaataaaaatatataaagactatataaaagggtacgtgctttataatggtgaaactaaagatccttcaataaataatgcttgttccttagcaggccttaaaaacgctatagttattgatgaaaagctggaacctaaaataaaggaacttggcatagaaagtaaaggagattgcagaaatacagatgaaaattgggcctatgataatttgtggaataaaggactaaatcattccatggtaatggagctttctcctgatagaattgatgcattaagggactatgccataatgactaaatctttaatattttacgaaggaagtgtagataaaacagctcttagagataaaatattttcttccgtggatgataacgctacatgtttgggctgggggccagatgagtttattaatgtaagtacggcttcaaaatatggtgtaagcatggttgcagcagattggtcctataatttaactacattaagtgctttcaaagaacctcatattaataaaaactcttcattaaaagttcctaaagaagaaaatgttcactatgttacttttataatgtcagatggagacaaccagcagtggaatcttggaactaattatggttcacctaagtggtttggttatgaaaatagagacaaactttctttaggttggtctatgactccagcattatattatttaagtcctactgtatttgatttatataacaaaagcataagcaatgaggatccaaggaataatttcatagtagctccatcaggaaatggatacatatatccaagcaaatttcctcgtaataagttaggttcatatgttgacttattaaataattacatggaaagagtaaatgaaaattgcgtatcaataatagatgattctgcgtttcatgatattgagctttggaatgagtttactaaaaaatcaaatatcaaaggtttattttatcttgactatcatagacacgataattataaaggagaaattttatggtctaataataaacctttagtgtcttgcagagatctactttggaattcacttgaagacgaagaagagctagtaaaaaagataaatgacagggtcagcttaggacaaacaaatatccatgatccagaagcatacacctttgtttatgttcatgtatggacaaaagagacaagtaacgtggagaaagttacgaagatgctaaaagaaaacaaaagcgtaagagtcgttccacctgaaacttttatggaactcataagtaagaacattaagcattagtgtacaaagctagataaatatcttataaatttattataaaaatctcaaacctatttaaaatgtaccctttgtcaaggacagtttaatttggtttgggactttttttattctcaataaatttataataaaatcaaatttataaatagattatgggataatattacttacaaatatatatttggaaaggaaataaaaaaggaatttgataattaatgacgaaatcaaggaatatagagttaatatgatttaacacctagagaaggttaaaattttttagagggtaggagggagataagtatgaaattaaattcaataaagttcaaattgattctatttatttttggactaacaattttactgtttagtgcaaatatagttatcagtacaattagctttaattcttattcagatcgtaacaataagacggaagtaatgaatgctaatgaaacaataagcgaaaaaattaaggaattgaaaaatgagtctttaagtattggaagtcaattggccttaaatcctagaataataaagggaattgagaataaagatagtcaggagatttttaatgatttaaaagatatattaaaagatctagatgtagaatttgttacaataactgatgaaaaaggtaatgtaattgtaagatcttatgaacaagataaaaagggagatagtattttaaatcaggcaaatataagaaatgctcttgctggtaaattaaactctcaagttgaaagtggaactcaaattaaacttgcagctagagcaggtgcgccagtaaagaacgaaaatggagatattattggagttgtgtctgtagggtatagattagattctaataatctagtagattatgttaaaagtaaatttgggtgcgatgctactatttttatgggagatgtaagaattgcaacaagtataatgaaagatggcgaaagggttgttggaactaaacttgatgaaaaaattgcaaaagttgttttgagtaataatgcatattcaggagaggctaatattttaggaagtaaatttgatgcatactattcaccaattactggagataacaatgagacagttggagttatatttacaggtaaaagcaaggctgaaagtcagctgtttataagaaaatttgttataaataatattatatcttctattatagtgttaatcttggttgggatagcaatatatttatacatagataaaaaggtatcaaaaccattagcaagtgcagtgactcactttaaacacttatcagaaggtaattttactgaaaagacattagaaaaagatttaaaacgcaaagatgaaattggagatatgtccagaggaattgagcatatgaggcaggatttaataaatctaattaagaaaataatgaacaattcacaagatatgagtgcagcgagtgaagaattatttgctacagttgaagaattttcagcaatgtctcaaaatattaattccggaattggtaatattaattttggtattcaagaaactagttcagcggcagaagaaataaatgcttcagtagaagaagttgaggcaagtattaatgtattaacaaataaggcagtagaaggaagttataatgcaagtgctgcaaaaactagagtagaagatatgcaaaatagatctttggaatccattagagaaatagaaatattgtttagtgaaaaagaagaaaaaatacttcaagcaataaaagaaggacaagtagtagaaaatataaaagttatggcggacactattgcagagatatcagagcagacaaatctattagcactaaatgcagctatagaggcggcaagggctggcgaacatggaaaaggattctcagtagttgctgaagaagtaagaaggcttgcagaacaatgttcagatgccgtagaatctataaaaagtacaatcttcaaagttcaaaatgcatttagaaatctttccaacaatagtgacgaggtactaacttttatgaaggaaagagtaaatcctaagtttgaagatatgattgaaattggaaaagaaaattataaggatgcagaatttgtaagtaaaatgtcaaatgaaatagctgaaatgactaaagaaatttcaattacaatggaacaggttactaaagcagtggagagcatggctgatacagcacaaaaatcttcacaagaaactgatgaaatagtaaacaatattgatgaagttaatagagcaacagatgagatagcaaaaacggctcaagaacaaacacgtcttgctcaggatttaaatgaaatgatacagaagtttcaggtttagtatacggcacaatgtaaatatagatattcaactttaaatctagatttatgtgataacttaccggtacgccaagcaagggcgtaaaagataatgagggctaaccttcctcattattactatatagcaggtgggaatcctgcatgacaaaggccatcaaccagtcattagttagtcttgggctta

SEQ ID NO: 157 - DNA, 9052 bp, Clostridium beijerinckii
aacctaaagtccgtagcgaagctgtacgtatatttagaaaaataattaaaaattaagaaaagaaatagctaatagcatgaaaaactaactttcttatgttattaactatatctatgaataattcaggttaaaattatgatgaagaattatttttgcaacgtatataatttaaaagtcattaattgcattaagaaatttgatatatagagcccagggataaaaaataaaagtgttaagtaaaaatacttgacactttgaaataatcctgttaaaatctcttttgtgggtaaggtgattaaatggaagatagagttgagatttcgttacttatggatttttatggtccgttattaacagaaaagcaaagtgaaattatgcagtggtattataatgatgatttatcgttagctgaaatagctgagcttaatcaaacgagtcgtcaggctattcatgatttaatcaaaagatgttataaacaacttctctcctatgaacgtaaacttaacttacttcaaaagagtataaatagaaaaaaggaaattatgaattttttagaacacttaaaaaataaatattccattgatgatgaggatattataaaatataaagaaaagctagaaaatttataaggaggagtaaacatggctttcgaaggattaggtgaaaaattacaggagacttttagaaaattaaaaggtaaaggaaagttgactgaaaaagatataaaagaagccatgagagaagtaaagcttgccttactagaagcagatgttaactataaagttgttaaacaatttatttcttctgttagttctaaatgtgttggaagtgaagttcttgaaagtctaacaccaggacaacatgtaataaagatagttaatgaagaacttactaatcttatgggtggaactgaaagtaaacttaattatagtagttcaggacttacagttataatgttagttggattacaaggagcaggtaaaactactatgtgtggtaaacttgcgctaaaccttagaaaaaataataaaaagccattattagtagcttgcgatatttatagaccagcagctataaagcaattagaagttgtaggaaaacaaatcgaaattccagtattttcgatgggagataaagtaagccctgttgaaattgcaaagaatgcaatcactcatgcaaaagataatggaaataatgtagttatcatagatactgcaggtagacttcacattgatgaagaattaatgcaggaactaaaaaatataaaagataatgtaaacccatcagaaatattattagttgttgatgctatgacaggtcaagatgctgttaatgttgcagaaaactttaataatgatttagatttaagtggagttattttaacaaaactagatggtgatactagaggtggagctgcactgtcaattaagactataattgataagccaatcaaatatgccggtgttggcgaaaaaatgaatgattttgaagtgttccatcctgatagaatggcatcaagaattttaggaatgggtgatgtattatcgcttattgaaaaagctcaggaagccattgatgaaaaggaagcagctgatttaggtaagagaatgttaaatcaagaatttaactttgaggattatctaatggcaatggaacagatgaaaaaacttggacctttaaataagattatggaaatgatacctggcttaaattcaaaggaacttcaaggagttgactttgataaggggactgaggctcttgataagactaaggcgattattcaatcaatgacattaaaagaaagaagaaatccaagtcttatactaaaatcgccatcaagaaaaagcagaatagctaaaggatcaggtactaatatacaagaagttaacaaactcatgaagggctatgaaatgatgaaaaagaacatgaagcaaatgaagtcattccagaagcaggcaaagaaaggcggcctatttggcaagttacctttctaagcattagagttaaaatatatatttattatcctttaaaggaggtgaaattaaaatggcagtaaaaatcagattaagaagaatgggtgctaagaaagctcctttctatagaataattgttgcagattcaagagcaccaagagatggtaagttcatcgatgaaattggatactataatccattaactgaaccagttgaagttaaaatcaacgaagaaaaagctaatgaatggttatctaatggagcacaaccaacagaagtagttaagagacttttcaataatgcaggtcttactaagtaatttttggaggtgaattctgcagttagtacatactaattgtaggcgtttatgaaggaattagttgaatttatggctaaatcccttgttgataacccagatgcagttactgttaatgaggtagatggagaacaatccataatacttgaattaaaagttgcaccagaagatatgggtaagattataggtaagcaaggaagaattgcgaaagctataagaacagttataaaagctgcagcagttaaacagaataaacgagttatagtagaaatcatctaaaaattgagagttagggaaacctaactctttttaaatatacacattagaaaaaagcgcgtaagcgcaattgagaacatttcgcctataaaaaaagcgcgttagcgcaaccaagatcatttgctgtaaaagatgcgcgtaagcgcaattgagaacatttctcttataaaaaaagtgtgtaaacgcaactaagataatttaactgtaaaaaagatgcgttagcgcaaccgcgaacattttgtctataaaaatgcgcgtcagcacaattaagattaattcgtatatgaaaaagcacacgtatatgagaagagtgcgattaacaattcggaacttgttaagtgaaactaagatcatataggcaatttaatatctttaacaatgagttcaaagaaaaaagtatataataatttatatagggcataatcaaaaaaataatggatttcagtataagatactattaaaaataacaacaagtcagtatgctggtctatttttcgtcatacgcgtctctaagttattttatgccattattcttcttatgcttaaaatgaggtgaaaagagtgggaaatttatttaaaattggtcagattataaatacacatggaattaaaggcgaagttaaagtctatcctctaacagaagatgtgaataaatttaaacgtctagaaactgttttagtaggtggagaggaaaagaaaatattaggagttaaatttcaaaaagatagagtgatactaaaaattgaaggtatagactctatgaatgatgctgaaacttataaacaaaaatatattgaaataccacgcgaaaatgagccagaacttccacctgacacatattatgtttctgatttaaaagaatgtactatatatgatattaatgaaaaagaaattggaagaattttcgatgtaataagcactcctaacaatgatgtatattggattaaggaacctaaggaactattaataccagttcttagagatatagttctagatatagatataaaattgaaaaaaatcattattaagccagtaggtgaatggcaagatgaagattagcatattaacgttatttccagaaatgttttctattttcgatcatagtataataggaagagcaagagaaaataacatagtggatttagaaacgctaaacataagagattatacattaaacaaacataaaaaagttgatgattatccttatggtggcggtgctggaatggttatggcgcctcagcccatagttgatactataagggatgcaaagttaagtaataaagggaaggttgttttcttagggccgagaggaaaaacctttaaccaagagattgctaaagagctttctaaggaagaagggcttatatttttatgtggacattatgaaggaatagatgaaagagtttataagcatatagatatggagatttcacttggagattttgtgttgactggtggagagatggctgcaattccggtcattgattgtatattaagattaattccaggtgttttgggaaaagaagagagctttatggaagagtcgttttataatggacttttagaatatccgcaatatactagaccagaagagtttgaaggagataaagtgcctgaaattctgctatctgggcatcatgaaaatataagaaaatggagaagacttaagtctcttgaggtaacaaagaagattagacccgatttatataagaaaattacattaaccaaagaagatattaaaatattaaaaaataaaaataataaataatttttgttgaaatataaaaaattatgtgataatattaaatttgtgctagtacgggcgttccgctgtcatacatatgtgttaagaacgtcaaattatcgttaaggagggaatgcacaatgaacgaaataataagagctatagaagctgaacaaatcagaactgacttacctaaatttgctatcggggatactataaaggtatacgttaagattcaagaaggtaacaaagaaagaattcaaatgttcgaaggtactgttatcaaaaaacaaaatggtggtttaagagaaactttcactgtaagaagagttgcttacggaactggagttgaaagaacattcccaatgaatgcaccaatcatcgacaaaattgaaatcgctagaaaaggtaaagttagaagagctaaactttactacttaagagatagagttggtaagtctgctaaagttaaagaattattaactagatagtatttgaaaaggggactgtttcagtccttttttttattatatgagaaaattaatatcaatatgtgattaatgtacagtgtacaattaaggatggaaaattcaaggaattttctgataataaaagtctaagtgattttattataatttgctacagggtgccttaaatggcgtgaaatgtgcattgtgaactgaaaaataaatttaaggaggaattcatatggcaattaattggtttccgggacatatgaaaaaaacccaaagagaaattaaagaaaacttgaaattagtagatgctgtaattgaaataagagatgctagaattccaaggagttctgcaaatcctgatattgaaaaattgttagagggaaaaccaagaattatacttttaaataagagtgatttaaccgatggcaaagttacaaaagagtggataaattatttaaccaaagatgatgttaaagtattagaggttaattgtttaaaaggtgatggacttaagaatataaagcctacactactaacattattgaaggaaaagcatgatagattaaaggcaaaaggtatggttaatataacaatgagagtaatggttgttggaatacctaatgtaggaaaatctacatttatcaataaaatggcgagaaataatatagctaaaacaggtgataggccaggagttactaagagcaaacaatggattaaaacaggaattgggattgagatgctagataccccaggagtgttatggcctagatttgaagatgatgaaacagctttgaatttagcttttactggtgctataaaagatgaaataatggatatagaagaattagctttgaaacttgttgaaaaattacaaactaattatgaagagaaattaaaagaaagatataaacttaaagaagtttttgaaaatccattagatacactagatgctataggcaaaaaaagaggtgctttaatttctggaggacaaattgactataatagaatagctgttatactacttgacgaattcaggggaggaaaaatgggcaatatcacattggagcgcccaatagaagaaaatgatacagtttaatgaagatataagatcgctatcatttgcggaaattaaggaagaaatacataagttatctatagttgatttatatagaaatggtgaacatacaaaagttataaactggctagaagaagataaaaggaaaaatgtattatcacttaagaaaaagattgagaaagatttagaatcatatttaaatgaagttaaaagagtcaaaacaatgtatgagtttgataaatcatttggaagttatcgatatatagctggtgtagatgaagttggtagaggacctcttgcaggtcctatcgtagcttgtagtgttattcttgatttaaatgttttagaaaaagatttaatcttatatataaatgattcaaaaaaagtaaaagagcataaaagggaagaactttctgaaattataaaaaaaaaggcattaagttatcaaatagcagtttcttctaataaagaaattgatgaaaaaggaatagcttttgcaaataataaagtgtttttagaaagttgtaatgcacttagcataaaacctgatttagtattatctgatggctatttaattaagaacattggtatagagaataaatctgtcataaagggtgatacaaaaagtgctagtattgctgcggcatcaattgtggcaaaagtgtatagagatagacttatgaaagagtatgctaagaaatatccacattatgactttgaaaataatgtcggatatggcacatcaaaacatatagaaggtctaaaaaaatacggaaaaagcgacattcatagaaatagctttttaacaaaattattgtaattaagttttggtcaaatgaaatttatatgaatggtatttatgtgtttaagataaagaagttgatttgaagtctataagaatattaaaataaataatattcttatagacttttttattttatatgctgtagcaataatcatacattaaggggatacaaaaagggctagaaaaactcaagtgagttaagtaattagttgagtctaaaggcatcttttatatggtttattttaaaatttgtactttctaaatttagataaacttcaatgacatcaaatctaacattaatattaggtaatcttttataattaatataagaattagccacttttattatagatctttgttttgaaaaattaacagattctcttggcgatccataattattattatatctactcttaacttccacaataattagtaaattattctttttgcatataatatcaatttcgcctaaaaagtttttgaaattacaatctaaaatactataatcattcttttctaaatatttcttcgctaaatcttcgctgaaattacctatatctttatttatttttttcactatatcacttccaattttatttactgaaacatattaaaaattattaactgtattgctattatatctttgaattattaacaattaaaaaataaatataacaaatgtatttttatggaattaatatttgaatgtatgtctataatttttagtaggtgatttatatggcagtaaaaataattagtgcaacgcacaatggattagaaggttttttgataaaagtagaggtagatatatctaaaggcttaccggtatttaatattgtgggccttccagacacttcagtaaaagaagcaaaagaaagagttagagccgcaatattaaactgtggatttgaatttccattaggtagaattactattaatctggctccggcggatgtgagaaaaattggatctcttttagatttaccaatcgcgattggtatactaatggaatcaaatcagatttgcagaaagaatttagaggattatattatattcggagaattatctctatttggtgagcttaaaggggtaaaaggtactatacctataataattgaaggagcaaggaaggaaattagaaaatttatctttccttatgaaaacttagaagaaagttattattttaagaatgttgaatattacccattaaaaagtttaaaagaagtagtctcgcacattacatatgaagatatgcttccttatgagatggatgaagatgggaaagatgaagaaatattagattcgccagattacggagatattataggacagtattcttctaaaagagcattagagattgcggcagctggaaaacacaatataattctttatggagagccaggatgtggtaaaacaatgcttgctaaagcattaatttcaattttaccatctttatctcaagaggaattaatagagattgccaaaatatatagtgcatgtggtcttatgacaaggatttctcgtcttaacagaccttttagagcgccacatcatacaactacaagaatagcattaattggtggaggaaaagaaataaggccaggggaaataactcttgcacataatggggtgctatttttagatgaaattttggagtttaagaaggatgttcttgaatctctaagagaacctcttgaagaaaaaaatgtgaatattaataggcttagtggaagttatcaaatgcctgctgattttttactaattggagcgtttaatccagtagaaaacaatgaggataaagattttaatgatagcaaatattatttgaatactaaaattactaaatattctaagaaattttcaagtgctttgctagataggattgatatattaaattacgtacctagactcaattatgatgaaatagaaaacaagaaagattcatacgattcgaaagctatgaaagaaaatgtacttagagctagagaaatacaaaaactaagatttaagaatacagtttataaatataattcagatataaaaggaaaggatatctttgaaatttgcagggttagtaagaaatgttcagagcttctaaaaaaatattataacacatcaagtgtatcattaagagggtatggaaaagtaataaaattggcaagaactatagcagatatagacaatcaaaaggatattttagagtttcatattctagaagcttttagttataggaaaaatattaatggagaaattatataggtttagaagggaacatgtataaatgaattatgaattgtggttaatacttattgatataacaagttttcaaaaaataaaattaataaataaatataaaacagcagaaaatgtatataataattttgagg

SEQ ID NO: 158 - DNA, 9044 bp, Clostridium beijerinckii
ctttttttattttattaaaagttagtatagagctttatttcgtgctaacttttatgttttaatatcaatatttatacctgatattaagataaaaaaatatgttactaaatattaaaattaaacgatttagaaagttataatgaatattatccatatatattgcaaaaataattcttcattatgattctaaaactattgcaagaattttagccgtaattgtgcattgtgaattgcaacatatatacattaataaataatgaggtggattttataagtaaggttattagtatgtaatatattttggattaaaataagataagattttttggtggatttcaaagatcacctctcgcctcaaccatgaaacccaccacacgtgggtctattattttttataaaacattggaggtggtatcttttgttagctgtttattttaatatttgtgaaatgttttaaatttattcatatgatggaattgatcgggaaaattgaatacttttaattattttagagctaggtgttggcttctataccactgttattatctgctgcccattcaaagaaatagaagaaaagcatcataatgttttactacgtcgcatgaatttggattatcctgaattgccggaaaaatattagaaaaaagtttatctttcgataatgacatatgcaaggttatagcggatttaaaaacaaaaaatatagtataatttcctgacaaggtatctattgatatgttaaattatgtaacatttcaataaaattaatcatatattgaactatacgaaagattcaggaggcgtagtttgatgcacgatttaaaagaaaaaataaaaacggtggaaataaatctacccaaagggaaagtagtgattgttctaccggaagatgtacctgtagattatacagagattaaaaagattgaggagcaacaaagagaagctgatcttggaaactctaacggagttccagcaacaatttcattagcttctgtaagtggagatttacttcaaacttatagaacaactgatgaattctttctatatttcaattatatatcaggaactgtagtcctaaagtcagaacatttacttgcaaggacctatgatatgaatttaaatgtaatagatactaaaatagtatcaaaagtagtaatgccattaaaggactttattgctgctagatttaatttcttatccttaccatctcaaaacccacaaaatgcaccaatgcatgtaaatgaaatatgggttgctaacaatgctattgtttataacacaagaaatgtggatgatatcatgtttttagggcataagggaattggtcttgttacaacagaggaaactgcgctctttacagttttgtatcaaaatggcaagcttacagcggaaaatgtatctactttcatgattatttctacaaggcgtttaaccacttatttatataacgcaatagatactaatttatcataatttaaaaggggctatttcaacagccccgttatgaaagtattagttataaaaaccttatgcattacggaaatcaagttatgccaattgttgaggaatttatttattctgataagtatagtaatcaaaattattttaaacaaggaaaggactccatattttttaccatattacctaatgtgattatagattacagtgttactttaggaagaatattaggcagcttaattacaattgcagtgatggtaataatggcataatacttatgaaacacttctttaaaaattttttagaaatgtagtggatttataaggtcatgcttcgcctccaacataaaatccacgaccatttgtatgtggcttaaatagctacttacaagcggttgtgttttttgaaaggtaaaggtagggaatattacattgttaatggagatattcttcctataagattatttgtataggctagttttccgtccacagttattacaacagcacccatacctttaattctattaactctatgaataattgaagcagcatctaatccaaacaattttgtagtatatatatcgcagtctatggatttatcagaaataatagttaatgaagctatattactttctattgggtagcctgttttgctgtcaaatatatggtgatacttacgtccatccttttcaaaaattctctcatatattcctgatgttacaactgatttatcttttattctgacaagtgccactgcatttcctcttggtagaaacggattttgtattccaacattccagtcaccgctgtttgatggtgagtctccagaaacgaggacattaccgcccatatctaccatagctgaaacagcgccattttccttaaagaattccatgactttatcagcaaaatagcctttagctatggcgccaaggtctatttcaatgcctttttttaagaaatacacggtctttttttcatcatctagttgtatattttcaggctttaaaagttctaatacatttgctatagcttctttctctggtacatgtgactccttaaaacctattctccataattttattaatggtcctattgcaatatttaaatatgtattctcacataaactatgtttttttcctatttttatcagctcatacagctctgcatccacttcttgcggagctagtggagctgttttttttagcatggcaagctgtgagttatcactgttagcactaaagactttttcataattaatcagcatatcacaagccttttctgcaagcttttcagcagattctccctttatatatagagagatctttgttcccataagatatattatcttcgtatactcattcattttgctctcctacaatgtaattattttgtccatgaattagaaatgcatctataaggtctttatcaatatcagttagttttttttcactgtgataagccataaaataatctaaattcagttcatcaattggaatttgatatatgttgtattcagatggacactcctttacatagatgctttctggtataaaggtcagtcccaaattactcgttgcaagattacgtacagtgttgatttcggtgctttccattatgatttttggttccaccttataaacgcttaataattgatctatctgctttcttatagcagaacccttggaagttagtatcagcttttgacacaatatcttgtttatgtcgatagttccttctggaataatggcgacatctttttgatatagatcacagcagcgaggaataatagcacggtatccatgtctgccccaagtaatagagtttaagtttggagaaatatttcttgaattttgtccaagccaaaaatccaattcaccattcaaaatgagtttctcatttttttctggtaaagtctctgaaagctctattctacagtttggatgtatatccaaaaattttggtaaaaaaagaggcaaaaggtaggtcccaaggctaggaagtactcctatctttataaccttgctatctatatcagacacagctgatatttccctaatcagcttcgcataattattttctattgaagttaaatactgataatatatcttcccctgctcagttaagcgatatggcagcttgctacgacttataagctcacagtttaactgactttctatccttttaatactctgtgtcaagtgaggttgagaaatataaagtgatttggcagccttgccataattgctgtattttaaaattgcatcaatataatacaaaatatcctgagaatagtattttgacatttaactcatccttttgtgaaataattaggcatatgaaaataaataacgagtcccaaatagccttgcaagtggacttgttatttatctgatgtctagccgctgtaacactcccgcttctataagcgggagataagtgagaatccaaatcttgtatttggttaatcgaatttatacaaatcacattagtgatttgtgaaacagcggcacgaccctagataagttcaactaagattcagatggagatcaaactccacctgaatcaagtttcacttgatttgatagtgccttactcatttaatcttgtgttcgattataacaaatatgttatcaaacttcaataaataactattagatataatatacttaacatgttaaaattatatcaaacaatcattaaaattatgaagttatgaaattttgaaatacaggaaggggattactatgaagtatttagcaattgtaggcactaactcagacgtgtcaactaatcgtatgctgcttcaatttatgcaaaagcatttttcgagtgaggcagagatagaactatatgaaattaaggatttacctgcctttaatgaaccagaggattctgatattcctcaaaaggtagcagaattatctgataaaattttaaaagcagatggagtaataatagcaactccagagtatgatcatgccatacctgcagttttaaagagtgctcttgaatggattagttacactagtcaggcacttactgacaaacctgttttaatagtgggggcttcttttggtacacttggttcttctcgtgcacaggcgcatcttagacaaatacttgattcacctgagcttgctgcaagaatcatgccaagtagtgaattccttttaggaaaatcacagggggcatttgatagcgcaggaaatcttatctattcagataagttatcagagcttgatgaaattttcagagagtttcttttatttacagatattacatcaaaacttttagcagaaaaagttttacataaaaaagttaaaaaattcacttgggaagagtaggaggcttaatatcaatgaaatttatagcaattgttggaactagtgcaaaaagatcatataatcgtaaactccttcagtttatgaaaaaatattttgagtcaaaggcagaaatagaaatacttgagattactgatgttcctatgtttaatcaatctgataatcagtcctcaagtgaagttatacagatgttcaataataagattacagcaagtgatggtgttattatagctactcctgagtataatcactcaataccatctagtcttaaaagcttaattgaatggctaagctttgatcttcatccacttgctggtaaaccagtaatgatacttggcgcatctcttgatgttcaaggttcttcacgtgcacaattgcatcttcgtcaaatcctagatgcaccaggtgttgatgcaaatgtaatgccaggatatgaatttttacttggaagtgcaaataaagcatttgatgaggaaggtaatctaaataatgaaagaactatagacttcttagaaatatgcttcctacgctttatgcgttttgcaaagatttcaaatcagcttaatgaagaagaagagtttacctttaacccaggagtatatgaggtagatgcaataggtcatagtggaagtcttccaatgaaagtatcttttagtgagaacagaatagaaagtatagatataaatacagatggcgagacagaaggacttgcagatgtagtttttgtaagaataccagataaaataattgaaggacagacattaaatgttgatgctctttcaggtgcttctgaaactagtaatgctgtactagacggtgtagctaaagcagttaagcttgcaggagttaaccctgacatacttaagagacgtccaaaacctgctagcagtcttataaaagaagacgaagaatatacttgtgatgtagtagtcgtaggtggaggtggcgctggattaagtgcagctgcaacagcgctacaaaatggtaaaagtgctattgttcttgagaaatacccagcagtaggtggaaacaccatacgttcaggtggtcctatcaatgctgcagatccagagtggcagatgcagtttgaagaaaataaaggagaaagacatacaattgaagagctactagatacagatgagagcttaattcatccagaatacatagatgatttccgtgcacttagagaagagttttctgcttataaggaaaagtttggaacacaaaagggacatctatttgactctccactacttcacagaatgcaaacatattttggtggtaaaagaactgaccttaatggcaacacaatatacggccaatatgacctagtaaagatacttacagacagagcattagaaagtgttaaatggctagaagatataggggttgagtatgataagagcatagtgtttgctcctgttggtgcactttggcgtcgtggtcataaacctacaaaaagccatggttcatcatttatacttgcactaacaaaatatgtacaagataactcaggaaaaatcattactgatagccctgtaaaagaattcatcatagaagatggtgaaataaaaggagttatagcaactggtgtcaatggccaaaagataactgttcatgcaaaagcagtagtccttgcaagtggtggttttggtgcgaacacaaagatgctgaaagaatacaacacttactggagtgaaatagctgatgatgtaaaaactactaattcatatgctatgactggtgatggaatattacttggtaaaactgtaggtgcagcacttacaggaatgggctttactcaaatgatgcctgtagctgatcctgaaactggtgaattattcagtggagttcaagtacctcctgaaaactttgtaatggtaaataaagaaggaaaaagatttattaatgaattctctggaagagatgttttaacaaaagctgctattgaccaaggtggtttattctaccttatagctgatgatgaaataaagaaaactgcagctaatacaagtcaagaaaagttagaccgtcaggtagaagctggtactttatttagagccgataccctagaagagctagcagtaaaagttggaatggaccctgcagttcttgtagacacaattaataaatataattcatatgtagatgctggttttgatcctgaattccataaggatacatttagcttaaaagtagagaaagcaccgttttatgctactccaagaaagccagcagttcatcatacaatgggtgggcttaagatagacactaaagctcatgtattagatgaaaatgataaaccaattaaaaatctttatgctgctggagaagttgctggaggtatccatgcaggtaaccgtcttggcggtaatgcattaactgatatatttaccttcggaagaattgctggtaaaactgcagttgatgaaatgaaatagttaatctccatcaaataatctatcatctagtatgataaaattctaaataccaagatttgaaatttttagccttcgacatttctgataggaatgttgagggcttaaattttttgtattcaacgcctagtacccccgggggtagttacacaaactggaagtttctgtttttataatgatggagtaagtgaagatgcattaattcaaaaagagcagtaaattgaaacctaaacatggataaatactattatagtatatatttatgattagattcattttattataggacctattgctttcagccttcattagctatgtgttgtaataacaagccaagctatagctaaatctactgtacttacagaggtatttaaatcaggatgtatgaaacagtatattctaaaccatattgcaatatatattctaaagaatatgtgcctaaaatgcgcgctgagaatgattttagatagtaaatctgaaatagcattgctaatagatttatttgaacattatttagttagaacattaatgaatgtaaaatttcctagagggaaaacgtattaattctgataatatgtttaaaaaaatttagaggtttatagtagtaattcatttgaataaagagaaagtttaaaataagttattatagtcgtttgttagtaatcttttaaattgacattcaaaatttagcgtgttataattttaatagttagctggctaactattaaaaaggagattatttatggataactttacttttattgatcgtcctgataatcagcgtttacagttgatgaaagctgtttattcagaattaaattcagatattgtcaaattattcattgattttcaatggacatatcgtaatatgcaaaaacaatatgattatgctcttgataagaacgatttaagtgaatcaagatttattattttgatgtttctatatcaggctccaaaccaaacattgttgccttcagttatttcggagaaattgggagccactcgtgcaacagttagcaaattattaaaagcaatggagatgaagggttggattataaaaagtacatccactacagataaacgttcattatccgtccaacttactgaaacaggaaatcatgttttagagaaatttttaccagaaaactttagcatcgttaacaatttgctggggagtctgtctagtgaagaaattcagcaactctcaaatttattaaaaaaaattaatgacagcactcaaaaatatacccaagaaaaggagaaataaaagatgcaaacaaaaaaaatcgaattattagaaacattccttagcttatatataaatcattttactgtgttagagaacattggaaaggaagattcgccatatgtcatattagacgttcgtaatgctccggcacaggtaaaaaaagaccaaataaaaggtgctattgcaatgccagcaaaagaattaggaaaccatttagatgaattagataaaagcaaaacgtatgttgtatatgattggactgctggtaccacgcttggaaaaacagcattacttattttattatcagaaggttttgaagcttatgagcttgcaggagcacttgagggttggaaaggaatgaaccttcctattgaagcattagaataagaatgaagaattttaatttatttaaaaagagcaattaacaaaataaaatggttcctatgtcaaggacattttgaaaaaggctaggcagctatgagctggtttctgtattgtacaggagccagctttttaagtccccactgatatctataattattataatactccatat

SEQ ID NO: 159 - DNA, 8821 bp, Clostridium beijerinckii
cgttattaatatggcattttttgtaatgaaccttgataaaaaattgagggtcattctacgccattttacaaattactatattttggaatactacatataaatatagggggttttaaagcaccccctagttataatataggtatgcataaaataattaaaggagataacaatgaacataacgataataacagttggtaaaataaaggaaaagtatttaagggatgctatagaagaatattcaaaaagattaggaaggtattgcaaattagatatagttgaattggtggatgaaaaaacaccagataatgcgtcagaaaaagaagaagaggtaattaaagagaaagaggggcaaggaatactaaataaaattaaagacaatatgttcgttatagcaatggatttaggtggaaagcaactaacatcagaagaatttgcaggatacatagataacttgggggtaacaggaaatcccaatatagcatttataataggaggaagcctaggaatctcaaaaagtgttttagcaagagctaattataaattatgcttttcaaagatgacatttccacatcagctttttagagtaatgctattagagcaaatttatagaggatttagaataattaaaggtgaaccatatcataagtagacataaaagaaaaataaattaaatcaataaaaaatagtagttacgtaattcgtatctgctttttttattatagtttatattaatattaataatagtattgtaaatagcataattataagtgttgatataaatatagaaactttaaatatatcttaaattaaataaggaggaatagaaataaagaaaaaccttacaagtaaaaataattgcttttataagataatggaaggaaaagttatattatctttaaaagaggagggattttaagctttaattgtctattatggaataaaatagataaaataatagttgaaaagtataccttagaggtatacaataaatgtatacggtttaggtatacatttaaggaatatgtttgggaatatggttttacagatttcatagaatgacattggtgaaaccgtataattaaagggaggtgtatttatgtttttcaaaactacagaacaacatgaaaatttgagaacaaaaataagagaatttgctgaagaggaagttaaacctattgcatttatgttggatcaagaaaataaattcccttcggaagtagttcaaaagctagctgatatgggagtgatgggtattccgtattcaaaggagtatggaggagctggcctagatgtgatcagctatgcgatagctgtcgaggaattatcaagagttgatggtgggacaggagtaatcttatctgcacatacatcattaggaacatatccaattgcagcttttggaaatgaggagcaaaaacaaaaatatttagtaccattagcaaagggtgaaaagcttggagcatttggtttgactgaagaaaatgcaggtagtgatgcaggaggaacagaaacaactgctgtactagaaggagattattatatcttaaatggcgagaaaatatttatcactaatggtggtgaggctgatatttatattgtttttgcagtaactacaccaaacattggtacacgaggtattagtgcatttatcgttgaaaagggatcagaaggttttagttttggtaagcattatgataagatgggaattcgttcatcagctactgcagagcttattttcaatgatgtaaaagttcctaaggaaaatttattaggtaaagaaggcgatggtttcaaaattgctatgtctacattagatggtggacgtatcggtattgctgcccaagctttaggaatagcacaaggtgcttatgagaatgccttagagtattcaaaagaaagagttcaatttggtaaacctatttgtcagcaacaaataatagcttttaaattagctgatatggctacaaaacttagagcagcaagattccttatttatagtgcagcagagcttaaaggaaatcatgagcactacagcatggaagcagcaatggctaaacaatatgcttctgatgtttgtcttgaaattgtcaacgatgctcttcaaatctttgggggaagcggatatcttaaaggtatggaagttgagcgtgcctatagagatgctaaaatctgcactatatatgagggaactaatgaaatccagcgtgttgttatagccgctaatattataggaaaaatgccaaaaacagagagtgtagcaaaaacttcaagggaacctgcaacaggatatcgtaagaaggtaatttataaagatggtacacctgaagaaagagtaaattctcttgtagaagctcttaagaaggatggatatgatttttctgtaggaattcctatagatactccaataagcaaggcagagagagtagttagtgtaggacaaggcataggagaaaaggaaaatatgcatcttatagaaaagcttgcagttcaggctggtgcagcaataggttcttctagaccagtagctgaaactttaaaatatgttccaattgatcgttacgttggtatgtcagggcaaaaatttaaaggaaacctttatattgcatgtggtatttcaggtgcaggtcaacatttaaaaggtataaaggatgcttctacaattgttgcaattaatataaaccctaatgcaaagattttcaaaaacgcagattacggcatagttggtgatttgatggaaatactacctctacttattgatgctttagacaatggtgaaccaaagaaagaggctccaccaatgaaaaagatgaagagagttattccgaaaaaagtcactccaacttggaaacattatgtatgtaatggatgcggttatgaatatgatcctggagtaggtgatctagaaggtgaagtaaacccaggaacactttttgaaaatttacctgaagagtggacttgcccagcttgtggtgaagaaaaagatatgtttatagaagtttaaaacaggtaataaataaattttttgtttaaaggaggattagctatgtattgtgttagagaagtaactgaagatctttattggatagggggaaatgatcgtcgtctagctctttttgaaaatgttcatcctattccaagaggtgtttcttataattcttatttacttttagatgaaaagacagtgctatttgatactgtagattggtcaatttgcagacaatttcttgagaatattaagggagttttaggagatagagacttagattacatggtcattaaccatatggaacctgatcatgcagcgtgtattgaagaaattgttatccgctatcctaatgtaaagataatatgtactgagaaggcatttttatttatgcatcagttcggtttccaaatagaagataaggtagaacaagtcaaagagggagatactatgtcatttggaaagcataatgttgtatttgtttctgcccctatggtacattggccagaggctatggtaacatatgatactacaaatggagtgctgttctcagctgatgcttttggttcatttggtgcattagatggaaagctatttaacgatgaagtaaattttgatcgtgattggattgatgatgctagaaggtattacacaaatattgtaggtaaatatgggcctcatgttcaggctcttttaaaaaaggcaggcactatagatattaagattatctgtccgttacatggaccagtatggcgtaatgattttggatatttacttgataagtacgataaatggagtagctacacacctgaggaaaagggcgtgatgattgtttatggaacaatgtatggtaatacagaggcagcagcaaatgagttagcaacaagattggttaaaaaggggattaccaatgtagttatgtatgatgtttccaaaactcatgtttcgtatctgatttctgaaacatttaaatatagtcacgttgtgttagcatcagttacttataatttaaagatttatccaccaatgctggactatataatggatatgaaggcattaaaccttcaaaaacgtacttttgctattattgaaaatggatcatgggcgcctcaatcaggtaaattaatgcgtgaattattagaagaaatgaaagatatgactattttggataatgaaatttcaattaattctagcatgaaagaaagcgatgaggatttaatggaatctattgctgatagcattattgaatcaatgaaataatacagaaaagatatgaattttaatcaactcgtaaattataataacgagttgattaaaattataataaagataatagcacttaagattagcttgaaggttcataatgttgagacatattattaaaaaatcaattatataggataaagaagttaattcataatatgtatttcaataaaaaaatgaatctgaatgtgttattatccagattcattatagatattaaaaatatagtttcttatttcctatatttaatgggttcttatatgtttaatcctattcttctgttttcgataatctcctctaactcatcagcagctttgattacatcttcttgaacaataagcttaccgcctgttatattaactaaatcttcttttaaaactttagtgacaacttcacttccatctataaaaggagatattgcaacatgtagtggcagacctaatgatagtccaaatgcagcatcggctaatgcttgctcttcaagccattgtggtgctgataatacaaggggaagttgaggtatatctatacccaagttttcagcaagttcagttgctaccatttctaatcttccaatagctagacatggaccaaagtttaatactggtggaatgcctagggatttgcacacatctcttagattatcacctgcaagatcagctactccaggagacataagaccaacattttcaaggcctccagaagaacatccggctgaaagaactaaaatatctctttttattaattctttagttagctcaacagtaaatacatcatgtcctttagctgttaagttggaacagcctacaacaccagctatccctttgatttttccttttgctattaagtcaataagaccgctccaatttccacctaggaactcttttaaagatccttcactaacaccagttacaacatcatcatgtccatgatctttaggaatgtctattgtgacgttatttcttctgttcttataactttctaatgcttcgtaaatgatcttttcactaatttcttcagcgtttctcatatcaaaatttatatattcagcatttttcttcttagcaacatcatctatacagatagtttttacattaaatttctcagctacaggttcaagtcctggtattgtacagttaaattctgagacaattaaatctatagcaccagttgcgagtacggcttcacttgtataattatttccagcatggcctgaaaaaacttcagtataatgctctcctcttaactgtagatcttggcctacgcatgtgcagccaactaatctaaagccctttgcacctaatttcattgctctttttgtgacattctcatcaattaatttatcttgaagatgtgcaatatcagaatgctgatgacctgtaatcattatgttgatataatcctcatctattactctaaagccaactttagcttgtctgatttttggagcacctagcataacatcatttaaaaggttagttaacactagaccatatattccagtagcaattccaagttgaagtgaattaagcagcatatctacaggatcactatttagatttgttgaagtttttactagagcatcaaaaacttcggattttgcaccgccaggtaaaatatttaattccttccacttatgatatcttggagcataagctaatttttctaccaattccattttttcaaatcttggtttatataaatccctaagaacttcatcagctactttaattgctttggcatttatatctgattcaacaatatcaaagatttcagcaagcttatccaatgtttctgggctttttatttttaaattaccttttccttcaccaatgtctttaaggtttcttgctgtagtttccactacgtgaaggtaacatgcggaacctgctgctatcgctcttaaaaagtttcttgatacgatagtatcagcatccgcaccacatacacctttaggtgatttaggtgttatcttacatggaccattcgagcagagtttgcaacagactccttcttttccgaatttacattttgctttttgtgtttcaactctgttgaatgatgtttctagatcttcttttgatgataaaaattcacataatttacaatctgctgatgtgcacattgacatattgatcatctcctttaattttatatttaatatttaaccaaaagtatactaaagaggtatagttttaagcaaatataaaaggctttcgcctcttatatttacatgtataaagttaccatggatcattctttagtttatcaaagttaaccttttctagttcatttatcattgtattttgaatattgtataaagccttgtgtatagaacagtgaccagctttatttgcactacaagccttgccatcgtaaacgcatctagtcacaataattggaccttgtatagcttcaaccacatcttttaaggttatatctttaggctccctagttatagcataaccaccattaacacctctataagactttaatattcctgcttgagttaactttctagttagttttaataaaaatctaagaggaatatttcctttttcagatagagattttgcatcaagtttgttatctaaaccttctttggatagcataagtattattctaaatgcgtaatcagattcttgattaatattcataaaatttactccttaaagtatacccatttggtataatttatcatagtacaattttttgtaattgtcaatgtttaggttattgcgatatcgcaattaaatagaatgaataataatatacattaaaataaaattcatgagtgtcttttaacataatgattataaagggaatactatataagtaaagcaatttatttgaggtgaggcttatgtttggatcttttataacaatgcttactggaattcgtatactgaaaaatatgaataaaagtttattgggaattattaaatatgaaaagccaatagataaaggaatagagattgctggttatgattatgattcggtacaagatatattttatagtaatatgaatgcatggcaaagaaatatgggatatagtagattgtatgatgaagcatcagcaccttttggaatgatagtagattgtgaaccaatctattttaaatataataatagaatatggttaatcgaattatggaaaggtcaatacgatttgaatactggatgtgaagtcggtgtgtatacagccgaaaagcctatattaaacttaccagaagtatataagtatatgttttataattgcgctagcgatgaagatagattaacaatctctctttcgctaaaaaagaatggaaaaacacttttcgcgttagatgataagcattggtggttagcaggctttaaacttggtgaatattcagagccttctgaattagtgatgtatttaaatattactttaaaggatgaagaaatgtgcagttcctttgtagaagcaataaaaaagataggatatgaagaaaataaggagtttattgtaaatggaaatactgtaggtttaacatttgataaaccgcacactactcaacctattacaaggacagagcagactgataagatcatacaaatgaaaaataaactgttatgcgataaatataatgatattactagagtatatagtaatttaacagataaaataaatgcaattcagaaacaggcaccagaaatctattcagaaatagtagataaagcagtattgagaaaatatttgagaagcatgaaaaatactgaaactgagtaacgtaatattaggaaggcagaatatatatcctgcctttacgtttatattgagtcatagcagttataactgccattggctctttttttctcagcattcttacttatataagaaccttctataactttattatatccttttttggatacaatagatttaatataatctagatgaggacatctgtcataatgataattatcatttgtcatgcaagatgataaatgtatcacaacatcttctttatttatgttattttttaacttaagttttttcgagagatgttctaatttagtagcaatactttttccgcagcatcctccacaggtaaaggaaatatatctggttgattcgttgtaatttttaaaaacgtcatctctgttgtaaaaggcatttgtacaggcaaatccactacaacggttatgagcaatgtcgcactggataataactacatatttttcatccattaaattttatccccctttttaaataaatgattagtaactgtatatataagttgtatatagaacaattatataattaattatatctcaataaaagtatatataagatattaaatataatttagtataagtaacaaaataaaagcattatacattggtaaaaaaagttaaataaatttataaaaaaaggatatgcagcgttaaattatctactacagatcctttttataaataaacctgaattattcataaaattatatgaaacatgctttgcatggctcgttaagctgttcttaacaaattcaaaacttcacttattaagtgaaaaaatatagaaaaatagactcaaatttgttatggtta

SEQ ID NO: 160 - DNA, 8796 bp, Clostridium beijerinckii
atatagacaaactaaatttatagttaaatatattttatttaaagtatatcattctggtgttttaaaacaaaatatcacttttcaaaattctattttaaatatataaattctaaaataagcttcaacttctattcctttatctgaaccttacccagttaaaataaaaagatattaattactttaagctgaatacaatatataagaccataaaaaccttagttaagaagttctatatctcgtacattatctattgcttaaagtatattaatatcttcctttttataattctatttattttgttttattagtttgaatagctattcttattattttaatttctcttatagatagaccaaccaactcactaatcagttcgtcactcataccttgacttatggctctcttagcaacaacctctattgatttttttaattcaccttgctcgaatccttgtctataaccatcttcccttaacatagtacttaattcagtcatatactttcccttgcgatactaattagtttcaatagtttttcttattattttaatttgttcaattgttaattctgtgagtttgctaataagttcatcacttattccttccttaatagctctttttgcaatttctattgaattttcttgctttccttccaattttccctcttttatcaagcttctacctaattcagtcatttttatctcctcccttactttttctaaatctttaccttctaaaaatttacttgcaaaagcatataggattgactctacatcatatctgtaatctttatctatatctttaaccactctaattgcatttattatcttatcacttttactaagcttcccacccattattggtgtaaatgttaaagatataatatcctgcttgcttagttcttctttatcatttattttatttattatatcattaaagattgcatctccatccttattagccattgatattgcattgactttataagaatttattccactattgtattcacttataggatcttttatatctcctgaataaacaacgtatgtcacaacatctttaccagtttgaaaattaaggagagattcataggttctaaaccttcttaaatcttcaattcccttgttagtagtttgaaattcaaaatgaatataagtatcatcttccattaggaaagtgtaatccattagcatattctttatctcaaggacaacaatttcagtagatccagtatcttttacttttttatctataccaaaaaatttcaaaccttcttctgcaaatatatccattgctcttttcattatcatatcttcataatttatttgtttcaccaatgcaccccctcatgtaaaaatatttttataataatctattcctctaataaaaccttacttatataatttaaatttattaatttaattttaacatatataagcaaatttctaaatatcataacaccactatgctatatttttattcaatctcctatcaatattataatcgacatatgacttatacaaaagtctatcctttattatataaacgcaaagcactcatatctctaacattaaacaattctttgtatattttatttctttatataatttatactgcctaattaataatacttatttagctatatctattatatagatttaattattgccactttaataaattgttatcattgtttattccaataatttccatctctatatattggcatgttaaaaatcaaatgaggagcacaatacactatattagctcctcattctaaatctttgataagaacatgaatatgattatacattctatattttatttcataatttattttttatctaggagaggaggatttcctcctttctagaaattcaaaataaattaatcatgattatttatatataaaacatataattgttaatgttaatatgctaaaaatcatatttgttcatattcctttcatctctattctattttaaaatagaatagaattttcaagttattatgtaggacgccttcaataatcaacgatttacgccataagactttcccgattattcccgactttttcccgactgagttctaaatcaatatgatatgttataattatccatatcgctacaacctagtatttaagatattctacagatatttataattaaatataatgatatgtaattggtaatttccagactcaggagttcgattctcctatgggtcaccaagttagaaaacatcagcatttaggtatctaaattgttggtgttttttctattttcccgacctagtttttaatatgttttatttaatatattatgtatttattgagtatacataactaattcatccaaatctaaaattatttttgcttcccttaagaaatctaaacctaataatccattaactctttcatttggatcaatttcaccaaaatctattttaaaatctttcagcgaagaggaattacaactaattgaatcaattcttttcctcacagcataactagatgctccaccatatcctgatgcctcaataagtttatcatcatttgagaactttgctccaagttcatctagaaaatctgttgttattatagtatgaaatgctcctgtatcaataataacatcatctatattcacacattttccttcatgaatcatctttatagaagtatatagtaatccatttttatatattagtttgtgtttcatcatatactccttctaacaccaatatgtttaactttttctatctctatactttcattttctgtactatatactaattgaccatttttacatttagtaaattctttcatagcttctcttccatcttttatggcttttattactgcaacctcatcaacatattttattttttcatcttcatgagattctacaatttcaaattttacaaattgatttggatataattctctaacttccttccatttcattaaaatcagctcccttaatttcaatcggctcttttacttaatttagacttttaactttaattgcaaaaccataatattgtcttatatcttaattataactaaaatcaacttgcattgaaatcataattctagataaacatttatgtcatatactgcataattaaaaaattgtttcaagagtttatttaagttttcaataagatttctactttttccaatgtctgataaaccgttataatatctttgaacttggagtgcttttaattctgataatttaattgaatataaaggactgtcttttacataattcctgtataatacctcatacttttcaaacgtagtaggctttattctatcagaaaccctaatagtctcaaatagccaagtgtgtattaactctcctagaagaactcgcttgctatctgttcctaaaacagcacttactctaaaatagttagtaccatttttattacaattagtttttactgcattaacacaccaactttactgcatttcttaaaaattagttatttcatattaattctatgaatttatttgctaacacaaaaaaactgataataatatcaaattcattaatattattatcagcatagttgttgaattttactgcttgtgatagccgagttatatattccaattttattataatacatccttcggaagataatatatccttccttcttttgcaataattctcacatcttcttgaaataaatctattggatcaatgttttggcgtgttgtataaccatttgtctgagcaataattttttttactgtgttgttaggaatggaacaaaacttattctcttcatttatcaagccaggaataaaatagataacgccatctaatcccattctttttctactcttttcatcaacatttatttcaaacttttcagtctgagttttatgccatgtgcttaactggtttaaggaatcttgtacttgttttgaatatgtaggcagcaatgcaccacactgttctctagaagctgagccaagatgtaatgtatgctttaattcagcaattttaatcattacttccatcagcgttttctgataaacaaaccagttctgagcctctgcaagttgcttttcgtattcctcgtaatcaaggttttctttatttccaaatcctgcaatggtaagattggcttgacccaagagctgaatacattcttgttcccatctattgagattataaatttcactaagtcttaattcatcattatcaagaatgtctacttggaatattgccaccttttgaatttgtgctacaagtgcaaataccttacttttgtattcattatcttggaactctgaaattttagtaattcctgcactaatctcgccaagctcttcattgatttcattcatataatattgcccgacaaccattgatgctaaattcattgccgatgctgctacattcctagagacattggaatttttcttcactgcaagaagattagcgtgacctttcaccccctcagcaccatggtagataccgcggacagcaccatccatttctcttgaattagcaagtttagccccagcggggatgattgctctatataacacttcagcatttgctttagcaccttgtactgcattacctgctgcatttcctgctttaaacaactctggtatcagattagtaacttgtgctaaaaccttgctatctgttatctccattagcttagtttcatctggtattgaatctaaagacagctgttctaattgaatcataagatggttcatttcttcattaacttgttctgaatttataagatttatattctgttttgtaactatggcattttcaatttttttagtctgttggcttctcttccaatacacaaaggcacctgcaacaactacaagaacgataatacctattatgaaaccttccatgctggcttcctcctatctcttgatatatataagcatacttttcaacgtctttacgttccttatatgtctttattattttatcaatatcttcatctcttaaattattttgatttttattcttttcaagatcattaattgcatcaataaataatatatctttattttcacgattcttctttaacactaaaattactgttggaatagttgttccataaaataaatttgctggtaatccaattattgtatcaagataatttttaccaggtaattcttgacctacagtaagcaacaaagaacctgatcccattgtcgggtcatatacgctaaataattcatcacattttcaactaagttagctattgactttaatcaaattatacttcttagctatttcttcattgactacaataacatcacttttccaaattgtattgtgatatgctaagtttctttttaatgcatttaaaataggtaccaaccattcttccttgtgatttttaataactagaatgaatttaaaatttaaaatactattatctaaatctaaaaacttactacttatttcattgtaatgattattttttcctaaaatagctgaataatataaattaaaagaatgtataaatttatcagtaatttcttctatatatttgttgaacttttccactttctcttcactatcttgtattggcttcggtgaactagattttgcttctataaaatctagctcattttgctttctcataagaataaactctacaactttaattctattacctattttgtcatgtaacttagagatttcaattctaaagaccctatcatcctcatatgccccaaaaatcataccagattcacttatttcaatcattactccatcgccctttctatttcgtcttcatataattgaataaaagtatctctgatttgattatgctttaaattatctagcttagtactacattcatattcaacaccattatcagtccgatataatgaaaaatacataatttcatcattatctgaacgtttaacatcaaaatattttgataaaatataatcatgagttgtaacaaaaatctgaactcctattgtttgtaatttaattaatatttcaactaaatcaggtataaatttaggattaatattagcttccggttcatcccaaaataagatgcttttattattaattaatccattccgtatcaactgccataatatccctatttttctaatcccttctgcttccattgaaaattcaatttttagtccattgttctttaaaatataaaatgtatcattttcatatatcacttctccttctatgatatttgatatatgatttaaaattttcatatttagatcatctaatctcttacttttgccaagttctgactttgaaataatatcaattaaagttctatcaaacggaatatgtctttcacgttctaatgctaaaaaacctttagaatgtgatagcatttcttttgctggtataaatactgaatcgatatcataataagcactactaaaatttccatcattattgcaataagattgtgcgttgtcaaaatcaatattaattataaattctttatttttatttcttctaaaataatgtggtactgtttcaacatctgtattatgtgtaaatatatcttcccaaaatcgcatcatagatttatcatattttaccgaaagaggagcatacatcattttcatcaaatgagttttgccagtaccattttccccaataaaaacatttattcctttacaaaacttcatatttaaattttcaaatacagtaaaattcttaacatcaatattttttatatacaaactaccatctccttaataacttagttttttctttattataaccttttatttttatttaagaatatataatatttattataattattatattaatcaaaataaacccacaaaatctaaattttagattttcgtggatttcatggtggaggcggagcatactttactctatccaagattagtaaagatcgcactcatttatgatagggtgcatcttatcgcaaataaatagaaagtcgttcacaaactcacgactattaccccagaggtctaattggggaaatttaacttccataacttttaaaataatttaaattctaacccctaatatcttcaattgttcattaatctcagcttcaagctcagcaatttccttattatcttgttctaacagcttgtttatttcttctaaatcaattggttcttcttcctcaaaagtatcaacataacgtggtatgtttaaattaaaatcattttctctaatttcttcaatagatgccaaatgagcatacttttcaacatctttacgttccttatatgtttttatgattttatcaatatcttcatctcttaaattattttgatttttattcttttcaaaatcattacttgcatcaataaataatatatctttattttcacgactcttctttaacactaaaattactgttggaatacctgttccataaaataaatttgctggtaatccaattattgcatcaagataatttttaccaattaaagtttctcttatttttccttctgcagcacctctaaataaaaccccatgaggcagcacaatagccattgttccaatcttatttaaatgatatatactatgcaatataaaagcgtaatctgcctttgaagctggcgctaacttgccgtattcaccaaaacgtgggtcttttaatttagtttcatcattatcccattttgccgaatatggtggatttgcaactactgcatcgaagctacgtggatgatcaatacctttttcatctggtccatctggccagtcactttctaatgtatccgcattgtttaataccatattgttataagatacaccatgcatcattaaattcatacgtgccaagttatatgtagttgtattcaattcttgaccaaagtacttcataggagtaccttttggtaattcttgacctacagtaagtaataaagagcctgatcccattgttgggtcatatacgctaaataattcatctgacttttctacaccttctgttactaccttagctaaaatcttacttacttgatgtggtgtatagaattccccaccttttttaccagcactagctgcaaattgaccaattaggtattcatatatttcacctaaaatgtcttttccatcatcacctttgtattcaatactatcaaccaattttactatgttgttaagtgatttagcacgttcatttgtagaattccccagacgcgaatctcctaaattaatatcattaaatactccgcggaaatcttttactgcttctttatttaattctgcatttttattaaaatgatcaaaaatagtttgatagtcactaggaataacttgtgaattattaattttttcaatcaatgactgccatgtatcctttggagcaatcgcatatcctaagcttgctgaaatgtcttgcagataatcttgaagctcttactcatctacttgtgaattataagcttcattaatagactctccatctataacatctataacattattctttaacaaatattcctcttgatgttctgataaatatctataaaacataaatgccaatatataatttttgtactctgatgcatccatagttccacgtaattcatttgccattgcccataatttatttgtaattgattgtatattattactcattatttctatttcctttcatatatatattattataggcgtttgcgaaacgccgcaacccgcagaaatgcgggatatttttttagcaaaataaaataactcctcactgatttatggtaaaattgaattgcctaaaaacaaaactaccatatacctcagaaa

SEQ ID NO: 161 - DNA, 8769 bp, Clostridium beijerinckii
attaataagagaaaagatttaaattttgagttattgggaaataattactaatatatttatttaagtgtataatgcttatctttaagccgattataccaaatattaaaatgctgatatatattacaaaaataattcttcatgataattctaagaatattacgagaattttagacgtaatggtgaattatgaaatgtatactatgaattgaaatatatatagttttatagaagtatttaaaatagaggtattaaatgttactaagcttatattaaatctaggagggaacaatatgtataatagagctaaaaaagaagatatagatgacttatttattaaatcaggaaaacatttcataaaagaaagagttataggaaaaccggttattttagaagaagtaattcttatacctattataagtgttatggttagttgcggaatagtgggagaaaaatgtgatggtttcaaaggaatgaaaggtgtagacattggcgaatgtataggggtaagtgtatctctagatgcaattttaataattagagatggtgaaactactataatgaaactaaggggactaaatgatctagatgatatacttagctgtattcctgacagagttgggaaatttaatattaataaggaaaatataaaggaagagataaatcttagttcataaataggtatcgtatagaactaattgatgaaatgctataaagtatattacataaatatttatttaacctaaaggttgggaggaaataaaagggtttggatatatctatttcattcggttatgaaactaaatgtcatgaagatgaaatgattcaagaaatattcataaaagcagaggattatatgtataagagaaagctttttgaaagttcaaatatgagaggtaaaactattgatacaataataaacactcttaatgagaaaaataaaagggaagagcaacattctgtgagagttgctaatctgtgtgaacttatgggaaagaatattggagtacctaaaaggaaaatccaagaattaaaaaatgccggattgctacatgatataggtaaaatagcaatagaggaaaatattcttgataagccagagagacttacagaggatgagtataatgaaatcaaacgtcatccagaaatagggtataggatattaagtacagtaaatgaaatgtcagaaattgcaaagtatgtactttctcatcatgaaatgtggaatggagaaggatatccaaaaggcattaaggatatagatataccttttgaatctagaattatatctatagtagatgcatatgatgctatgactagtgagcgtccttatagaaaagcattaacagaagaatttgctatagaggaattaaaaagaaattcgggaattcaatttgatcctgaattagtaaatttatttattgaacaaataacaaaaaaataagccctgtaagaaatatgtaaaccgaattcaataaattaagataataataatcaaattataatatatagtataatcatttaataggctgtcgataaaatcgacagcctattaattttggaatagtattttcactgatatatttaaatttataaaattatttttttattccagtgtatataaaaatagcatctcttaaaaaagcggccaggccagattgatccttatcataataggcagtaaatcgttcatcatcaacatacattttggcaagacctgcatgggcttcctttgagtactcgctccaagaataagctagccattggcggtgtaaatcagcagctttttgtgcaggctcgcttgaaggatcattagttttaaaagcatcctttagtgtatccataagtttaataactaacttttcgaattcttcatattgttctttactcatactttgaaattttttatttgatttatttataatatcattaccatatttggaacgtatttcattaccatatttattttcattttcatctatcatcttttgtttaaaaccttcaaatttttctttatcactcattataattctcccttctgatgaagctagcgttttatcaacattagctattaatatatctagttgtttgcgttttgtaagaagcttttcgcgatgctctttgagtgcactggtattattgaaatctggtgataacaacatactttttatactttcaagatctactcctaattccttgtaaaataatatttgctgtaacctgtctatttctttttggctataaatccgatatccagatgaattaattcttgccggcttaagaatccctatctcatcgtaatatctaagcgttcttgtgctgataccagccagtttgcttagtttttgcactgtatattccatgtgattgcctccttacaagattaatttacacctttacgtagcgttaatgtcaatagtattatttgtaattgttttaataaaaaataatattgtacaaattaatttttggaatttagtgaaaaatacaaaaaataagtgcaaaaatgggtaaattatgttaaaattttaataagaattattagttgattacaaatatcaacaaagggggaaagcggtgtgagatggtttaataatttaaaaataaaatataaattacagatcagtttctttataatatctatatttattgcagtagttggagttataggaatacttagtgtaagtaaaataaattctaattctaatgcgttatatgaaaaagatttccaagtgctaaaaaatctacaagattttaactcaaatacattacattctagattagaaattttgaatttattaaacagtaaggattttagtaaagttagccagacaataagtaatatagatggttatagagataaaaacaatgagatccttaaaatatatgaacaatcagatatgaatgaagacgaaaataaaatatataaagaaataaaaagtgatttaacagattataggaattcatctgataaaataataagtctagcaagtgatggaaagtacgacgaagctatgagtgttagcaaagaaagcgcaaacataagagagaagttaactaataatattgataaattagttaaaattactgaacaaaaagcatcagataaaagcttatctaataataaggtcaataataaatctttttatataatggtaacaacaattattttaggttttattactgcagttttattaggtgttataattgctacactcatatcaaataatttaaaaaaagtattattatatgcacagcacttagaagaaggagatttaactcaggaaatagagataagctctaaggatgaaattggcagtatggcaagagccttaaataaagctaatgaaaacataagaagattaataagcgtaataatagatggatccaatgatataagttcatcaggagaagaactatcggctacaacacatgatgtttcttctaagatgaatgatataaatgaatcaattgaacaaatatctaaaggagcccaagatctgagtgctataacagaagaagtaagtgcatcagcagaagaaattggagcgacaacaaatgaactcgctaatagagcaaatgatgcggctgtttcagtaggggaaataaagaatcgctctcttgaaataaagagaaaagcttcagaaaatatagaacaaggaaacagtatttatgaggaaaagaaagcaaatattataaaagccatagaagatggtaaagtagtgaatgaggtaaaattgatggctaatgctataggggatatagcatcacaaactaatttacttgcacttaatgcggcaattgaagcagcaagagctggtgaaaacggaaaaggatttgctgtggttgcagacgaggtaagaaaacttgcagaacaatcatcagaggcagtttcaagtatacaaggtatggttttacaggtgcaggctgcattcgaaaatttatctcaaagtggagaagatatacttaactatatagctcaaaatgtaaagccaagctatgaattacttatgaatactggcattcaatatgaaaaagacgctgaatttgttaatgaaatgactgaagaatttgcatcttcatctaatcagataaatgaagttatagaacaaataaatcaagctatgcaaactgtatctgcgacagcagaagagtcgggtgcaggttcagaagaagtactgaatagtattaatgaaataacattagctgttagtgatattgccaaatcttcgcaaagtcaagccgaactatctcaaaagcttaatgatattgttttaaaatttaagatataataagattttgattctaatatataatttagaatatatgttgtactatatcaaaatgatagttttaggctattatgtgagaaagacattttacaacatatattctttctttattaaattaatgtataagtttaaaataaagttataagaagaatttgacaataaatattctttgcattaaaatattttctagaaaaaataacaggaggtaatatcatgataaaagaaaatggtaacatatcaattgacacagaaaacatatttcctattattaaaaaatggctatactctgataaggatatatttatcagagaagttataagtaatgcatgcgatgcaattagtaaatttcaaagattagtttccctaggagaagcaacaacaaacggagacgagcaatacaaagttgttgtatcaataaataaggaaaagaagactcttaaattcatagacaatggtattggtatgacagaggaagaggttaaaaaatatataaatcaggttgcgttttctggagcaacggattttatggaaaaatataaagataaaatggatgaaggtaaggatataattggtcacttcgggcttggattttattcaactttcatggtatctactaaggtagaaatagatacactatcatttagagaaggcgctgaagccgttaagtgggaatgtacaggtggaacagaatatgaaattggatcttctagcgaaagaacaacaaggggtacaacagtaacactatatatagatgatgaaagctcagaattcttggaagaatataaggtaagagaaataatcaagaaatactgttctttcttacctacagaaatatatttagaagatgaaaataagccaaaagaagaacctaaatatgaaacgaagaagaaagaagatggaactgaatatcaagaattagtggaaccagaagcaccaaagccattaaacgatacaaatccattatgggttaaagcgcctaaggattgtacagatgaggaatataaggatttctatagaaaagtatttatggatttcaatgagccattgttctggattcatttaaatgtagattatccgtttaatttaaaaggaatattatatttccctaaattaactcatgaatttgaagcaacagaaggtcaagttaagttatataataaccaagtcttcgttgcagataacattaaagaagtaatacctgaattcttattacttttaaaaggtactattgattgcccagacctacctttaaatgtatcaagaagtttccttcaaaatgataaggaagtttcaaaaatatctaatcatatagttaaaaaggtagcagataaattagttgacctgtttaaaaatagcagagaagaatttaataaattctggccagatatacaaatattcattaaatacggctgcctaagagatcaaaaattctatgataagataaaggaaataataatctttaagaatttaaagggtgaattcgtaacattaaaggattatcttgaagccaataaagaaaagcatgaaaacaaagtattttatgctaatgatgaaaaacaacaatctcaatatataaagatgtttaaagagaatgatttagatgctgttatattagattgctcactagatgatcactttatttcgttcttggaaatgcatgaatcaggaattaaattcaagagaattgattctgatatttcagatacattaggaagtaaagaagatgaaaatgatgagactataaaagctttaaataaggaaatagaggatctatttaagactgcactaggagacaaaatcaagaatttatctattgaaggattgaagaatgaagaaattccggcacttattttagtttcagaagagtcaagaagaatggctcaaatgagtaagatgtatgcaaaatcaggaatgagcttcccaggtatgttcgatgaagaaaaaactttagttataaacaataagagtgcaataattaagaagcttctagaagtttctaagaatgaaagcaaaaaggaagatgttaaatttatctgtgagcatattttagatttagctaaaattgcaaataaggaattagatgcagctgaaatggatgaatttataaagagaaataatatgcttttaaataaagtagttgctctttaagatatcgttaataaagtttcaagtttaagtgcttggaactttatttttctttgggaaattattaattaagttaaatctgctgataacttttgaaagtattggaaatacacagtctacgaaacagatttttatgtgaagtttagtataattttaacagtaaaggttaaatttgaaatgaaattttaagtatgataaaatattctaatgtagttttcacatacatttgcttaaatgaagggatatttatatatgaaaaatgaaatttttagacctaaactattatatagaaagcgcattaataagctattgcaagaaatttttcgaatacctatatattttatatcagcatctatgggctacggaaaatccattgcagttagaaattttatagagaagaataaacgagtgcaaacaatttggcttgatataacaaacgatgaaattgatgatatgtggatatggaaaaaattttgtgatttaattaaaaatatcaattttaagttaggtgaaatgttatatgcctacggggttcctaataataataaagatgtttataagataatagatataattagaaatgagataaggcaagaaaccatcattattattgatgactgggatgatgaaaaaatagtttatattaatcatttaataaaagctataatattggaagatataagtaatttacacatagttataataagtagaaaaaagccggcaaatgagtatatagaacttgagctaaagcaaaaatgtatgataatgcgtcaggaggatattgcattcacctttgatgaaacgataaatttctttaagattaatggaataatattgacagaagtagaagaaaaagaactatacgaatatactggtggatggacttcagctatgtatcttgcgttaattcaatattacagtcaaaatacatttgataatataccaaaagcaacagagttaattaaaatagctgtatatgataaatttgatgaagttaccaagcagattttattaaaactcgcattggttgagaatttcacgatcgaacaagccatgtatattactgaagatgaaagatccaaggaggtaattagaagagtatgttccaataattgctttataagatacgataagaaggaaaaaatatatagactacattcaatccttaaaaatgcattagaagaagaattagcattatcaaatgtagatttaatgaaagtaaataacatttgtggtgattggtatgctaaaaattttaatgacatatatgcaatggaatactattataaggctaagaattacgaacgtatactagatttaatagagagaaattatacaatagatcttactaatttatataaagaaattataaaaccagtttttaatgagcttactatcagtgagaagataaaaaggcctatagcttatttaacttatttatttttttatattctttacggaaatagaatagctggtgctaagttattgtatgaggctaaagctatctatatagaagataaaaatcttaaagataaaaatcaaatactaggtgaaatcgcatttttggagagcatattagtcttttataatgttaggagaatgatagagtaccataaaaaggcctacgagctctttaaaggaggggggtcgagaatagcaaataataaaatgccggcaacttttggatcacctcattttttatacttatttcacagaaaagtaggaaatttgaaagagttagtggaattttttcaacaaggaataaattattttattcatatatcaaatggtggagcagcaggtgcaaattaccttatgatggctgaatatttttatgaaacaggagattctaaaaatggagaattgtttgcatataaggcatttcataaagctaaaacaaaaaaacagacaagcataataatttgttcattatttctgttaacaaggatttgtgtgaataaaaattataaaaatgaggttaaaaataatttttataatctgattaaagagtatgaaaatcttaatattccaatctttcttaacggttcacagatagctataggatatattgatggaatcactggtaatttagaaaatttaaataagtggattaaaaatatagaaagtcatgaatcaaaaaatattatgcctgttataggaatgaaccatgttatcacaggtttagcgatgatacttaaggggagttacataggggctgctccaaattggcttaagtgtttggaatagtattatgtatgatattttatggaatactaagtgcatagatattttaaatatagggtaaaaacccttgcacttaggagtgaatttatat

SEQ ID NO: 162 - DNA, 8719 bp, Clostridium beijerinckii
atattaaatatcatattttataattttagtcttttattgtagtcttttataatctcaatagattcttttaattctgccttttcactttcaactaagtgatattcaacaagttccttcactccttgattatttaaaaccgccggaacacctgcatatgtgtcactttccccatactctccattaagcatagctgatacaggaataactttattttcatcgcgtaatattgcttttacaatctgaacagtagttgctgcaataccaaaagtagttgcacctttagcattcacaatacgatatgctattttcttaatatcttccgttactgaatttaaattaaaaccttttaatctcattttattgtcattgattatatctaaaaactttttacccccaactgtaatttgactccatggaattatctgtgaatctccatgttctcccatgcacaaagcatgaacactttgtgggtcaacactcataacatcagctaaatgatatttcaaacgtgctgaatctagagctgttcctgttccaatgactttacttgctggcaaacctgaaagtttgtgcacataatatgacataacatctacaggatttgttatcacaactattatgcctgaaaatccacttttcatgatgttcggcactatattattcattattcctgcagctttttctaacatatctaatcttgtttgccctgtaatataaggtaatgcagctgcaattacaactatatctgcatcattgcattcttcgtattccccatcttttaccctcatcttacttccgctatatccaagagaatgttgtaaatccgtcgcttcagcccatgatttttctttatttatatcaatcagtattaaatcatcgcaaacatgattcattaccatgtcaaatgctactgctgccccaacagaacccgttccaactattactactttacttcttccaattgccatatatatccccctctactaattttgctataaatcattatatcaaaaattaggtctattatcatctaaacaattccactttggcataaaaacttattccttaatccaatagctgcttccatctttttttctttctataaaaccatactctattaaagctcttcttatggttacgtaatcctcatacactctctttagaatcctatttatctctttttcagaatattgctttccttttgaaaaatttcttgatatctcttctaatacaataatctttttcttttctctagctggataactccttaaaccaccattttcattcatataagtttcaacaacactcttcttttctttatctgttatattatacctatcatctaaagtagttgctgttttataagcatcacatatagtctctttgccaattttattaattttcttatttgttgtttttgaaagcaaatccatcatagctaaaaataattttgcttgcttttccttttctcttaatttataccggtgatttcgtattgttgattgcgcaactttaagtttctctgaaatttctttatcagataatcccatagcaataaattttattaattctctttgaacatctgatattccagtaaaacttgaattcatatttaataaatattcaagcattgaaccatgacttgtttcaagatgcaactctgctgatttctttgcatcatatagctttgaatttatttcatatattcttcccctctggaattcttcttcgcatattatacacctgtatccatcatcttcttcaataatcccttctttgagctcacttatagtagcattccaaaataattcatttgattttatatccattaatctcattccctttcaatataactactttctatttaatatattacagacttttatttattttgtctatatataaacaaacatttatcactaaagtttacaattttatcagcataaactttctgagtacacctcataggatttttcaatgttctatttatttcaaataaaaataggccaaccatctctatttattgtttatggttgacctattaatatattagatatatcttaaaacttacttgtattttttaatactttcagatttgaaattctattattataattctaaaataagagcctatctctttgcatctgaatgctaattctatttctgcattccccataatcgttagattttagctttctaaacttgtagtaatcaaaactctctatagtatctttaggcgcgaaattaaagattgctacaataaaagctttagcctttcgttttaacttaacaaataagtttcctatttcatttttattcttcatatttatcttacctctactaattccaaatttcattccgtattttttataattcctttccttgaatactccctaaattctgcttcatgatattccatttaactcactccttttttagtatttttaaaatttttgaaacagcttatttaataataaactagcaccacaataatagtttacccttaccacaaattaaatgatatgtaaaaaattattataattaaactttcttaattccgactctttaatttagaatcagcaaaaaactgctgaatataattttcaacgcaatatccaactaataattaattagatattgagttgtatattatttacaacagtttctttataggattcctgtaccttgcaaatcattttatattataaatatgaactttgtctttacttggccttactttttagcactatatgtgatgattctaatttttcattatttaacttaaatataatttttcttatactatcatctgaaagattatatgcctctgcaatatcaaaaactctttcgccttttattaatttttctgataaatttatctatctctaataaatttgtcaactctttcaaaagttggcatagcttcctgagctcctagtgcggttgttgaaatagcacctactgcatttccaaatattacacattctttaagttctttttcttttgctagggcaaaagcaaatcccgcattaaaagaatctcccgctgccgttgtatctattggatcaacaataaatcctggaactctagtacatttatctttcttaataattgcagccccatcactacctaactttgcaactataactcttactcccttatcaaataatgtttttgctgcttctacaaggttttcttcactatttatctttcttccaattaaagtctccaactctgtttcatttggtgttaaataatccacatatttaaaaatttcatcgggaagacccaccgctggtgctggatcaagtattactgtcttaccttgtttctttagttttttcatagttgcaattgctgtttctaatggaatttctaattgaaacaaaaatatatctgctctctcaatcaaactccatttgctttcaatataatttatatcaacttctgcattagctcctggaacaacaattatattattctctccattattacttacttgtatcactgctactccagaagacatgcctttttcaatgcttactccatcagacttgacattattacttcttaaaacttctagatatctttttccatacatgtcttcccctatttttcctaccataagcacatctgaacccaacctacctagtgctattgcttgattaccaccttttcctcctggaaatgtattaaacgctttccccatgacagtctgtcctgccacaggaaaattttctactgtagttactaaatccatatttaaacttccaattacacatagacttttcatataatacgctcctcttcctacattaaattaaaacgaaatatatttataatttaaatctagtgttattatatcacaatttctattcctaaaaatttcactaactcaacatatgcttcggcactccaataatcttgtatcactactattaaaatttctaaagttcgcttaaaccctaaacttagaaacaacgttggctaactcacttgaaatgttagccaaagtagtggcagatgcaaagaattcttcctgagttgctagctgctcttccactattgcagatatatctgtacttccttctagtgatttatttgaaatttcacatatattcttagatattttttcaattgcatttatttcattaaccattactaaaatttcatctgaaatattttttatttcaccgtcaacatcattgtttgactccacaatattcttaaatgctccttcaacttccaaaactttttctgagccactcattacctcgctaaccgcaatggacatacttttaatcaatacattaatgtaattttgaatttgagttaaaattttagatatctctacagtagatgttgcagaacttgttgctagtttgcgaatttcatctgatacaactgcaaatccttttccatattcacctgctctagctgcttcaatcgcagcatttagagccaacaactccgtactggctgtaattttagaaatagtatctagtatggtttctatttgcgatgaattttcttttaaaatgccagttaccgattggatattcataacttgttctttaatagtgttcatttgatttaacatggatctaactttctcatttccaccttcagctattttaagagatttattagccgaggacaaaacattatttgacttttcttttattttgctattcattttaataagtctattaactgcttcttcagtcctttttgcttcactaaattgatactgcgaaccatcgacagcatcttgagtagatactgcgatctgattaactgctttgacactttccttcgccctatccttgatcatagtagaagattcatataaatccttgctattattaataatccccttaatcatagttcttagattttttgtcatttcattaaaagaacttgtcaataaagatacttcatcgttagaattcactttatattcttctacctgtaaatttccattagcaatatcatcagctaatagtacaattttattcaatgattttcctaactttatcgaaaagaaaatagcaaaaattatgctaaaaaaacctatggatactataaaaacaatgattagcactcctgtaaaattagattttttagccaaatctgctctagctttattttgttgatctaattcgactgacatatattcctgcatgctattttgaattagtttagaaaacctgttcataagtttatttttttccaccatttcagtggcattcttactttcaaaaagttttatattttcctcagaataggactctaacattctgcttacagcatcaaaagatttcagtgtcttctctcccgatagattatctttaataaactcttgatttttgttaatatttataaacttatcatctataatttttttattctccgctgttggatttaatatatattttgatatatcctgaggaattgagtttattaaaattatgatatcgttcgccataacgtttttttcaatcataatattttcttgtactaagtaagacctcatagtcatataagatgttattcctactgtagatatcaagaatactattaatgagaagcttataataagctttgattttattgttaagggaattcttcctggaactgagcttatttttttcatcttgaagtttctccttcctcttatgtcattgattatgtaaaattttcagatctaattttaacttctaaattaatatctatatattatttaattggtgccccaaaagtatattcataccattgatcaggtgtttgagttttcaatccaaatatagtatctccgtcttttgtcaccataggtatattaggtgtaataatatcatgtggcattgaaccattcttagtgattatattaagtaaagttctcattccaatatcagatattaagggcgtgtatggtgtattcacttcaaataatccatcttttacggatgtaattgcctttttagaatcatcaattgataaaaacatcatctttttagcatcctttctgctatttaatctattagcattctttgatgcatcataagcagcaatagcttcatgatcacctgttccaaatacaacatcaatagaaggatactcatttaatgctaattgcatattggcaagtgcttctgctgtattatcatcatcatgatatgattttaatatgtgaatatcagggaaataacttagtactttaaggaaatgaccagttctattagcatcagcagtgcttccagaaggctttctaagaagaactacatttgcatttaggctgccttcttttgcaagtttccaaattaaatacataccacattgagcgccatttgctggaaaattcccagtaactctactcgtggtctcctcgagtcctgtcattctatcaacgcttacaactggtatacctgcctcaattgcccttttcactggtgcaatagttgtctctgattcaaccataggccaagttagaatcccatccactttctgcagaacaaaactatctattatatctgccattctatcgttgtcccattgagcatccttaacatcaacttcgacatttggatgtctttctgcttcccattgagctgcatcagctaaactaacattccatggctgatcaaatccatgaatagcaacaccaattctatactttttatttaagtctccaactggtcctgattttaaggccacataatttgaaaatggtaatttcaaatccagctcgctaaatgctccttttatcttagttccatctccatttgtccatttatagttaccgaaaggctttcccgtaggatatgtactcatataagtttcaaatttttcattcttatatatatccgtaatctctttatttgcatctgaaagaggtaaattaataaaaaattctaatatatcactatccgataacccttttgatttaaggctttcaaaaaaatccaatgcctcttgtccttttaaatttcttacctgatcgtacaacggtgccaaatccactgatttctcatttgttacagtttgtgttggaacttcttcaatataatctttttgcctgtcttcttttggttcgttatcaacaattactttacctacttgggaacaagctgataaaatacttccaaccaaaattattaatacaatgcaacttaatttgcgtaacctaaaatttaatatttccattttgactttcctccttggtagcatctaatcatattagtaattcaatccttttaatacacaataactacttagatatcatatttgttaaatttataacaaatataagcctcttaaaaaacgtttacacaacttgtattcctcccttgcaaactatcttttttaatacaaacttattgtaatgttatattcactactatattaaaatacttctatgatttctataattctacaataatttcaaaaatcctttattttatacttcttaataaatgttatttttacggtataatattacttcggagatttaaggtaaagtatatataataattattcttatacatcaaccttaaaaataaaaagctctcaacatacattgagagcttcacttgtattaattaaatgctaaaaattattattttcaaaatatatatttgtaaacttctttaaaacttgatatgaaattctaaagcttgtacaaaacttatattcctagataccaacatctttaatttctaaaataaacttactactatcattttagcaagttctcacataacttaaaattatgttaatcatattaggtattttgacattttaaaacatacgctggtggtatatttaacactactctttctaaacttatatcttcaaaataacttcctatatatccctttttaagcaatgtatattgaaatgttatgaataatccattcttttttaatatatcttttgtttttttcaatatactatttgacatattctttggcaaactagcaaatggtaatcctgatacaacatagtctacttctttaatattgtattcttttaaatatttatctacattttcagctgaatcatttactattacaacgttattatattcaccatacttttcctctagttctctgcagaattcttcattatattctacgagcattaacatcgtatgatcctttatttttttcattagtctatcagtaaacactcctgttccaggaccatactccacaatacattttgcatggtcaaaatcaatatcatgcgccattttttccgcaagctttttagaactaggagctacagctccaacagttcttggcgacttaaaatactccattaagaactttatccacataataatacaaccctctctatattttcttaattagaatacatattttattgaacttaaacaaactaaataaaatatatattctattattaacaaaagagactacccctcgatttttaaaaactagagataatctaaaattttttataaatttccttctaactattttcttatttaattacaacacttctgtatagacatgcacagttttaaaagtacataatctgttagaaaattttacatagctaacaatgtttagatgatgagtctctaacacaatgtaaaagtcaaaaactattttggggccgaaatttttttaacttctaaattataacataataaggaaataaattcaatgttttacataaactaattaggtgaaaa

SEQ ID NO: 163 - DNA, 8677 bp, Clostridium beijerinckii
gcgtagggagtcgtcggcagcgtcatatgtgtataagagacaaacgacaaatagatacaaataatattataaaaactcggatataaaaagaaaaaatacagaaaaaagccattaaatggcgaaaaaaagaaaaaatatcatgatgctaaaagaaggtttttaagtgtattttgtagaaaaatttaattatataaaagaaatgaatttttagagaggtggttgactatgggattaatcaggctgagatttaaataggggtagattatgggtgatgaaagtaattcaaaattataacgtgggaaaatatgtatgagaggtgaaaatggatggatttaatatgggataaaatgtggtcggttggtgttgataagatagatagacaacacaaagaattgtttaatagaattaatttacttgtatgttctatgaaaaatgcaaaaggaaaagaggagatgattacaactttgaattttcttgaagagtatgtaattagacatttcaacgatgaggaggaaattcaaaagaaaaataattatcctaattatgagattcagcataaggaacatgaaattttcaaaaataatttaaaagaattgagaaaagtgttcgaaactacaggtgtatctacgttatttgtaataagcgaacaacaaaaaatgtcccattggtggcgaaaacatgtaatagaattggataaagatataggcaagtttcttatggatgtttaaacagattgtttatgtaatcttaaaggaatcagcgaaataaaattcatagtggttactgtggtaaattttaaagtgggtacaatacaatggaggttatgaaaggtggaagtatatggttcatttaattaatgatatagaaattagatctaagcatacaagagaaaaatatggcatacaagttggaaaaattaaatttgatttatcaaaagaagtaagtcttataaaaaaacaattgaattatgggagcgaagaatttataaatattagattaaataatgaggaaataatcattctttataatgctatgaataaaataagctacgataatgtaaaaccgtatattattgatttttatacgcttcttaacaatgaatttgtaggacattgtgtcttggataatgcatacatagagtatgataatgatatttcgtattcaaaggtaactcaattacatttaaagactggagttaattcgcaattaattgttaagaagcttttaatatgatgcgaatgaagttataaagtaaagataaaaatatttagcacatgaagtgctgatgtttaatctttattttagcagagaaaggtagagattatgaaagatttcatgaaagattttaaagtatctacatttatatttttgtttgtaattatgcttataattaatattttggttatatatattacgaattaataatttattgaatagactagtatcaaaataggaacaaattcttatgatcaattgtagattttgtaataaacttactgcttaataagttaaggagatttatttggctgagtgtgaaaaaaagtttaaaaggaattaaagtatcaagacacataataacgttgtttgctaagtaattttggtgggagcgatgaaggattattagaaatattaaatatattcaatggttaagaactaaagaagaagttaagtgatgttgatgatgagtatagagatagaaaagattttttgctttaagatagatttcggaaaagatagttgataacgtctaattttaatatggattctatcaatatcttttctaactgctatatagtaaaggcaactatgtttaatggagtgagagagatgaaatatgaggaatattttgaagaagtatgctcaagtgatataagtgattggtgttatgaggatgatataggagtatatttgtatagaaataatatcgatataattataaaaaatgatataaaatggcttgaaaatagcgatgatacatgttatgaagattggacaagtatttttccaaataaacatgcatataataaaaggtttattcttaaatatagggagcaaataattaaggtggtatatggcgtttttgtagatgcgtgtacatgttttattcctttcccggataaaaaaatgaacatcacaaagcaaaaatatgaaataggaaagattattaatagttttataacttcagatgaaaaattcgaatcttatttggtaaaagctaatattaatgttatatcggaatgattaataaagttattttagaaattcattaatttattttcattagattagggaaattattacgcaataattttgataaataggtttatatttagaatactaggtaatcctagcgaattaattaatgataaaacgtataaaatttaatttcacaatgtattaaaaaatattttttaaatatacaaaataagacaaaaaaatgcaggcgggatgtgataagatttatttacagtattttagtttaattaaaataataaagtaataaaagagaagtgaaagcgtggtgagtgtcttgctgtgtaataataattaattatttgtcaaaaaaatgaacagctatatagaggaaagtagatgctttttataggaacttatttttagatatatgaaaaaaagaagtgtaaacgatacttgattccaaactaatccaccaggagtgaaggtttatgactgattttaatgataaatattaaaaggagctataaatcagtaagtgtatttattataaacagagagcaggtggaatttatgagtagttggcttgtgaatttaaattcaaaatttgcagaagaatttgatataagatttgatggatttatcgttaaagaagaagaaaaagaagaatttttaattaaaatgaataagattgcacaagaagttgttgagctaactgatttaaagttgaatgaaatagatctatttgagtgtaaagaaattaatgaaaaatgtctttaataagtgtttattctgtaatttgatcgtgtttctaatgaaattaataaaatgtttataaggatgatgaacttatgtcaacattaaagaactatgaaatttattgtgaattcacagatagaaaagtaaaagtaaaagaaaattatattttaacttgtggaaagatatttcctataagatgttgttatgtattagatgatgaaagcaatataaaagaaataatacatacttgtaagtatcgtgataatggtgagtgtgttttaacttaaaagaattataataattttgatattcagggggatgagatgagatggatttagaagaaaaatacaaagatataattgaagcatacacaagaacaactaaggaaaatgatgaatttgaggatggaagttattcctatagaaaaaacaagtttaagagtaactttgaatacggggaatttaacaaggagaatagaaagcttaataagagaaataaaaataagaattggtcttaaagggttaatttatctgttcatattatttgttgttacatatacagtgtattctggactaaaaaaatatacagctataagcagctccaagttagaacttaatttgtggctgctttactaatatttcaggtgaatcaaacattgattttctagcattctaatgataaaatatatttaattgtattaaaattataaatatatatgttgcgattcacaatgcaaaatttacaattacgactaaaattcttacaatatttttagaattatgatgaagaattatttttgtaacgtatatataaaaaatgttgatattggaactttaagtagttcctttttatatgatcgttttaagtatttgaagttgcttatatagctgatcaattggaactaattaatcattagtcctaattgatctgttttgtttaaagatttgaatatgagattaagtttttattatattaatataagtacaaagaagtggtcttaaatatattaattagcttaatatattaaaattctcttatttatagaaagcatataatgagatggtagttatctgattttttactatgtctttatcatatgtttttatttatgtgcattattatatttataaattatttagataagtataacaggtgatatttggaaggggttatagaaattgtgtatctgaggagcagaagctttgcatattcatattaaaaaatagatattttaaaataagaattttaagggtatagatgaggggttaagtaaaattgagaaagaaatatatatatatactatttggattgataattatattaatattttctataggttattttgtgagtaaaagtttctataataaatcgcctctagttgaaaatggttctatagatctttcgaattgggattttaataaggacggaaatgtaaaattagatggatattgggagttctatcctaatgaacttttatctccttcagatattaataatgaagtggaattacataaggtttatattaatactcctggtgcatggagaaaccaaattccaaataatgtgatatctgataaaggaattggaacttacagagtaaaaattaagataaataaaagtgtcttaatgtatggtataaagactacacatatacggtcagcaaacaaaatatttgtgaacggaaaagaaattggacaaagaggtaacccaaagccaagttttgaagaaggatatttctcagatattcaacggactgttacatgctttaagccagaaggagatactttagatattgtcattcaggtagcaaatttagataattctagtggaggtataatccaaagtgttttcttcggagattatgaagagatattagattactatatcatatttattgtattagatatagccaatatattaattttggggatttttggggtgtactacattggaatttatttaaaaaatattaaacaaaagaaatttttgtatattggaagcgtatgtataatttatgtttttgtttcatccacagtaaacgaaaagatatttaataaaattttttcgtttatgccgtatttttggattttgaagataaagctagcattaataagtttgagtatatatcttgcactcttatttatacggcaatatggcaatgattttgttactagaaaaaacatgaaattagcaaagtatataatttttgctagtatttttacagttttgctaataccaatggaccttgtaggattatttgaaaatataattgatacaataaatatattaatttctgttcttgtagctttttcaattatgaaagcaatttatcataaaagatatggagaattggggaaaaaaggaacaatacttttgctttgcggagttattgcggctctaactcaatattgtatttttgtattatactattgttcgataattaagagcagtgtaattccttttgttacatactttattttcttacttgcgtttttggttattattttgaaacagcatataaatgcatataataaaattcagacaataaatagcgatctaatatcattagacaagttaagaaatgaatttttaatcagcacttcccatgagtttaaaactcctttgcatggaataataaatattgctcaggctattttaaataaaaacgatagaaatacagcaaaggtagatgagaatttagcatacataatatctacaacgacaagattatcaagccttgtaaatgatataattgactttcaaagtatacagaatgaagagcttaaggttaataaagaagtatttgatattaatggtgttgtacaggcagtgtttgatattttggcttatatgagaaagaatgaagagatacagttaattaatagtgtaccaattggagaatattatgtttatacagatgaaaataggtttaagcaaattttgtttaaccttatagttaactctttgaaatatactgaaaatggatttattaaaattaaagctgaagtagcagaaaagaattatattaatataacaattgaagatacaggtataggcattgatgaaaagtatcatgatgaaatatttgaaagaaacattgacatagataaagatgtttttaatggaatatttccgtctgggcttggactttctatttctaagttgcttgcatctagaattggtggggaactgtatctgaagtggtcagaaccagatgaaggctcaatatttgttgtaaagatacctaaagcaaacgaaaatagttatatcattagacaagagcaggatattgaaaataatatcactacttcaaggagagatgaaaaacttagtgctaatatattgtgtgaaccaactgaaactaaaaacaatggagaaaagctaaagattttacttgttgatgatgatgtatgcaatatcaaagttttacaagaaatattttatgacagtaattatgaaactttagttgcatataacggggtaaatgccttagaattagttaaaaaacataaagatatatcaattgtattacttgatgtaatgatgccaggattatctggctatgatgtgtgtaaaaggataagaaaagagtacaagctatttgaacttccaatattacttttaacggtcagaagtacaccagacgacatagcgttgggatttgaagcaggtgctaatgattttttaaccaaaccttttaattttatggaattaaaagctagagtaataactcttcaaaaaatgagaatcgcagtaaaagaagctttgaaaatggaaactgtatttttacaatctcagataaggcctcattttttgtataatactttaagtgttattgtttctctgtgctatagagatggaaaaaaggcaggagagcttcttggagaattgagtaaatatttacgtttcgcctttgatatagacccttacaattcgtttataagcttgaaggaagaaatatcttttgtaaaatcttatgtgaaattagagaaggctaggtttggagaaagacttacatttgaatttgatgttgatgaagagtgcttgaaaaataccattccagcattagttatacagcctctagtagaaaattcaatacgtcatggcttagtgaaacgcatttctggcggtagagtaaagatatctattaagaaaagtaatgattatattaaaattgtaatacaggatgatgggataggtatagatgctgataagttgaagggattattggacgatagcgtgtccataaatagtggattgaaaaatgttaacaaaagactgataaatgagtatggacagggtataattatcgaaagtaagatagggcaaggaactactgctacaataaatatacctatgaaattagatatataagagcaagggatgaagttatgattaaagcaatggttgtagatgatgaaactttaactaatgatcatatttgtgaattaattagggatacaggtgctgaagttgagggatatacaaatcctcatgaagctattgataacataatgcgatttaaaccggatgtgttgtttttagatatagaaatgccggaaattaatggtttgcagtttgcagaaatagttaattcaatcgaatatgattgcgagattgtatttattacagcgtataatcaatatgcaatcaatgcatttagagttaacgctatagattatttgttaaagccaatcatagttgaggaactttatagttcaattgagcgtgtgaaaaagagaagatttttgacttctagtgttagtccaaataaagaaataaaaatttctttatttggaggggtatctctatatataggagatgaaaagaaacctattagatggatgacagctaaaagtgctgaaatttttgctttcatgcttctaggaaaagacgataaagaaatatctaaatggagattaatgaatgaagtatggccagataaagataaagaaaaagcagatattaatcttcgaagtacaattagccgattaaataaaacttttagggagaattctataaagatttcaattatatctactggaaatggatataaattacaaatggcggaaccagatataagaatagatgcatttgaattagaaaacttagtatttaatatcgctgaaataaattctactaatatagagcattatgaaagagttatacttaattataaatatatgcttcttgaagattttaacagcgattggtgctattttgaaagagaaaattatcatagatattttttgaatggagcacgtaaacttgtaaaatattataaagatattaatgctgagccaattaagattttaaaacttgttgaacttattattcgatacgaaccttacgatgaggaaatgagagggaatgctttaatgctacattataaggtcggtggaataaaaaaagcagaaaaatattataatgagtactatgaaatgatagaaaatgatctgcagatggagccatcagcagctgtaaaagaattatacaaatacattttaaatcactagataataatttttatgataagtactataagtatttacaaatattaggcaatattagactattatatataattcgaataagaatttatattatgaaataaaaataaatactccaagaaaggttaaaaatatacaatgtttacatttttaaccttttatttatttaatttctaaaaataataatatcttgccacaaatttgcaacaatatat

SEQ ID NO: 164 - DNA, 8155 bp, Clostridium beijerinckii
atctgaaaataattttttactcattcttttcacaaccttactatatttcttcttatcttttattgtacaaaaaaagaacctattgaaatagtctttttttagtgtctatttcataggttccattttattaaatccctgagcctttttgtttatctttactttttcaatttaatttaagttttttatactacttgtattcttatattcattattattatatatataaatacacctgcttcatttttaatgtaataaaatatttattgatcactaaaattaaaccattctactatcttatttacatcattaacatttgaatgtccagccttaggtaaaatatttatttgcgcatgtggaagtaaattacctaaacgccttgcagtcttatctgaatgtaacattatatcctttgctcccacaaataacactgttggcatggttaatagctttaattcattatcagaaaatacaggaattgtctcttttctataattgaagctctttcctataagcttttgatattttaacatttcttctggtatcggctgatttccattaactttataatataatttatctatgcctttttctcctaaaatcccataagcaatagctttaaaaatgaaagatttcttttgtgggcctacgccagaggggcaaagcaatacaagtttagatgccatttctggataacttactgaaaactttattgccagccatgcccctaatgaaatcccaataatatttgctctttcaactgataaattttcaaaaacctccttaagccattctgcataagaagacccacttaatgaaggacggttttcatcacttttcccaggctcacccaacatatctatagcatacactctgtaagttttagaatactcctttatatctcttaaccacattacagaattcatgccactgccatgcagtaatataagaggtggattacttttttcaccgctagctataataaacgtctttccatatttcgtatctacataaaacttttcatatgatagtgccaatttttgaaggaatttatcataaaattttataacatcattttttccttcatttgttttaaatactttgcccatctccatctattttctccttagtctcataatttcgaaatccaactttcagcttctgcagtgtccttaaaagttctaaaattgtttcctttgttagattccatgatcatttctttaaatctatcattaagtttttcttcattttctataataactgcgactttcacgtgataatttataaatttttgcaacgccatacccgcaatcctagtcttaagattgaaaaaatcttcagataatacatttgaatgaaacataattgtataaacgtcattttccatacaaatagatatacaatccaccgcatcttgctctgaagaaagtttccatacttcagaagcaaattctatatatttaacattatttttatttaccactttataattcaaaacattcactctcctctatatattagtttgttccacaagcatagaaatggaatttagcatttcttcaatgaagcttacattcccccataataaaacccttagcctgttttctttttcatcatatttcatattaattgttgattttcccattttagggtctttacaattcattactgctataagagtatttgatattctaaagtattgttctttatccacatcatttatatcaacaacagtagatacatttattttttgtttttcggtttctttaacttctccattagtaagaaaatcaatacttgattcatcacttgcttttttattatttatattaacattattcttttccataaaaagacttaaatcatgaccagaaattctccattgctttcccactttacttgcagcaagttttccttctgttataaactttctaatagttttatgatgcatgcctaatatttctgctactttatctattgtataaaattgattctccataaaaaatctaccctttcaaaattgatctatggtcaaattataataattctttttacttatgtcaagtattttattgtattttgctatactttgttgcactttattgaaccataatataaaaatctcactacattattgccttttctcaactacaatttagtaaaatttatatataatgcaattcacgatgcacattttacaattacggctaaaattcttgtaatattcttagaattatgataaagaattagttttgcaatatataaatctttatattcacaacatttatcataaattttcttgcataaacaaaataataagaaggagaaccacatccataatctggacttgattctcctccattacttaaatatattattaaattgcaatttataaagtaaacttaacttgtgcacacttattgagtagtcacagcgtaagcgaccatcattaaataacttctttggttttaaaaaattattttaagttcaatttttcaattgcccactctgccatttctcgtacctttggattactatcattacaagcatacagtatatgttctttatattgctctttatagtcatttaccattacattgatagcattaactttccatttccaaacacttgatttatctatataccaaaacttaggctgcataacttcttctaaaaatttataatccattttgattattttttctagagatatatgttcacttaactcctgcagattaggaaattcttctgtttcctgccaacgatttttattcatagggcatgcatcttggcaagcatcacacccataaacccaatttcctatttcttctctatatttttcattaatcatatctcttcccataaatgtagttatgcaagatacacatgctataggattcattgtatatggttttgataatgaagctgaagggcatgccttcatgcataaattgcatttatcagaacaaggtcttacatttggtatttctactgcttctaattccttatcaataagccatgcatccaaatacactgatgagccattttcagtataaaagaaattattctttcgaactattccaagtccagctttcatagctgcaaagcgtagtggtacaagaccaaaacctctttcagtttctgctctaagccctaactcttgcatatattcttcaaattttacgctatcttgaaaatctttagaattcttatcttttcttgcatcaaccaaatagtattttgcaatcatgccttttaaatgttctggaatatgatatttgccatatcttctcacacatattacaattgattttgcccaaggataagtctcctgcaattgtgtaaaacgatattgaccttgataaaaacctttagactctggaacacgttcaacacgttcatcaagtctttctttatagccatctatatcagatattttaatgattccacacttttcatatcctaaatttaatgctgcactttttattttatctgctaataaagtcattttctctacaccctttcttaggttaggtaaaaagataataaactatatatgttgcaattgaatttctgtatttaaccctttattgaactctgtgtttactagaataataaatgtaagtttattattgcaacatatatagtatgcttgtttgttatttatttcacatatattagttaatgattataattattctctttcaactattaaggcagtcccttgacctccaccaatgcataatgttgcaagtccttttttcgcatctcttttttccatagcatgtagcaaagttactaaaatacgtgctccagatgcaccaataggatgtccaagagctatggctcccccattaacatttactttattcatatctaagtttaaatctctagctattgctatactttgtgatgcataggcttcatttgcttcgattaaatctaaatcctcagcttttaaattgattttatctaaggcagcttttgttgcataaaatgcaccatatcccattattgctgggtctaatcctgctgatccataagaagtgattttagcaagtggctttattcctagagctttagctttatctgcactcataattactaatgctgctgctccatcatttaatccagatgcatttcctgctgtaactgtaccattttccttaaaaataggtttaagtttttttaatgcttctatagtattgccaaacctagggaattcatcttgatcaaatattatttcaccttttttagttttaattactactggaattatttcatctttgaattctccactctttatcgctttttcagctttttgttgtgataaaagtgaaaattcatcttgttcttctcttgttacattccatttctcagccacgttttctgcagttactcccatatgataatcattgaatgcatcccataaaccatcttttatcatttcatcaatgaattctccatgtcccattctttgtccccatcttgcattatcaagtaaaaatggtgcactagacatgttttccataccacctactgcgatagcatcagcatcaccagcttttataatttgtgctgctaaacttatagctcttaatcctgaaccacaaaccttattaattgtaaatgcaggtatttctacaggtagtccagctttcacagcggcttgccttgctgggttttgtccaaggcctgcttgaagcacatttccaaagataacttcattaatttcctctggtttaatatttgctcttttaacagcttcttttattactattgcacctaattcaactgcaggtacatcttttaaagcctttccataagctcctattgcagttcttactgcacttactattactacatctttcatttcttattcctcccatattgaaaaatttacttgttatttttttaacaaattttgatataaaaaatttattcgcattaattatttaagagtttttttcataaaacttaaaatttactaagttgatttgcagctgctctatgactttatattatcagatgattatatatttgtaaaattaatatattcgaattgacaattcgattttttcaatatattattgaattaacataaagatcggagtgaaattaatggatataagacatttaaaaacttttaaaagtattatagaagaaggtaatttttcaaatgcagcaatgaaattagggtatactcaatctactgttacctcacaaattcagcagttagagcaggaactctcaataaaattattcgaaaaaattggacgtaatatggtactaactcctttaggaaaagaattaataccatacgccgatgaattgcttaatacagtgaaaaaaattgaaagcattggtaaatatggcgataacattacaggagaattaaaaattgctgttgcagaatctttaatgtcttataaattacagaatgtattagctatgtttaaagaaaaagctcctaatgtaagactttctatggttgcgctcaattgctatgacataaaaaatatgttagctagtggtgaaatagaccttggcttgatgtataatgtgggaagtaaaaatgaaagtttaaatgctgtgaagctttctgatttcgatgtagctttagtatgctcaccgcaatttgaacaagaaaaattagatttcagcacacctaaccaaaaaataaatacaagccttatcatcaacgaagttgaatccatttatcgaaaaatacttgaaagttatttttttgataaaaatatattcctagataatacaatcgaacttggcagcattgaagcgataaaaaaatgtgttgcgagtaatcttggaatttcgtttttgcctcgttttacaatagaggaggagcttgaaaatggtaaattaaaagaactcaaagcaggcgacttaaatgctaaaatcacggcaatttatgcttatcacaagaataagtggatcagccctgcaatgtctttatttattgaattggtgagaaaagattttaatattcaataactatagatatacagctttaaaactaaatttatgtggtaacttaccgaaatcataaatattttgattccgaaaagctatgaaaatatcgctgaaagttctaagcagcaggttgtatccactttagcatgctccaactttcagtttgacaagctaaaatggaacaacctacagctaagaacctttaacagctcattttcaaatgttttctccacaaatatatttatgatttctagtgaagatatgaactcaaagttttagaaaattcgtaaatatattcatctaataagtctgattattgaattggatatctatatttctatataaaattttacccaccagaatatatgacttttctggtaggttcattttatcacttacgttatgcttaagctatacgtcaattttttattcttacaaattttgtatttttcttctactatatatttagatccttgggataactcccctaaattgagcctatcattattaatagtctacctaatttaccattcaacgttttttattttctaggtaggtgataatatcttctacatatccatcattaaactctgtctctcttaatatataataattgtttttatttataccatctatatcaaccttgtcttttatatatggagatattaagagtaatgtatcttcatcctgaattaaattttttaggtcatcatatgtagaatcaacatgaactttataatccatatttttttctttcaatttttgatttaacttttctttcagagtttcagaaagagattttttaaaaatatttaatcctccatccattccaaagggatttggtctagcccctactattactttggcgatgataataatatttttcaattttatttcctccaatattttctcatatactatataataccataaatttaattaaaccccatgctatttatcaaatgtagtaatgaaattagagtatatccaatctactgttaattcacgaatttaccatctataacaatgactatcaatcaagttattagcccaaattggacttcatcactccaaacaaaaaaatagtagcccaatgattactcatggatagctactaattttttaactattataaaattatagtgataccagttgcctaagcaactagaattatatattatatggttttaaaacatatttccgcatgtttatttgccaaattgttcttccgtaatatcaagtgtcgaaaggttaccagcgccactttacttttcaaattagtcaacgcatattactccttttatctaaaatctcataatatagattttagtccaatcagagtattattatctgtagcttttacatcggtatttagcgaaacagatgccaacggagtaactatggatttctagaatccatatatacactcttaatcaacgcaagcttataatctcttgttgatcaagaatagtatcttttaattatagtaaagtaccgccagatgcttcaatacgttgacctgtaacccatcccatttcatccgtgcatagactagcgacaacacctccaatatcagaagcttctccaattcttcctagtgcagcatgagaaccaacaatatctttcaaacctggatttttaatataagtatctccactaaattcagtgttaacagctccaggcgctatagtattcactcttatacctctagctcctaattctacagctaaatatctagaaaaaacttctactgcaccttttgcagaagcataaagtccagaacctgggaatgtaaagcgagttaatcctgttgaagtgttcacaattccacctttgtcagcaataagcggaattagtttttgtgtcaaaaagaaaactcctttaaagtgtatattaactattttgtcaaattcctcttctgtaacttctaaaataggagtgtgatttgagatcccagcattattaattaaaaaatcaaactgctctctattccatttatcctttaaaacatctgataacttatatgcaaaggaatcaaaggaagatatattacttacatcaagctgaatagcagcagctttaccaccatttgcttcaatttcttttacaacttcatctgctttttctttttgattattgtaagtgataattacatctattccttttt

SEQ ID NO: 165 - DNA, 8068 bp, Clostridium beijerinckii
ttattgataatagtatgattcataaaaatcgtttccttcatataggtaacagcaaatctatatgaaggaaactttaagtattttatattaatatatatacttaatttatatttttattcattaacaccatttactatttgataattgcttatcttttattttaccttcaaatccttttacagtataatgctctgttaaaacttcagggtcataagaaatatatccaccttgataatcataataaccatcattcattttatcagactcacgttttttattttcttcactcataatatccactccctctttatttaaagtagtatttattacagtaaattcttacttagatgtagatgtccattgattattagtagcagttttttcatgtttatgtgtagactcttctttgtcataagtacgtggtacagaatcccattgattacaccctgcacttttttgttctctaagttcttctttgctagataaattagaatcactagtgccacctgtactagaaaagttttgaagattgtttgattttgattttgattcattactcattataaacacttcctttctacaagaatatattgtgcactattgtagacttttatccttattttaattatcctcatttttcatttttatcatattctagattatttaatacttctaaaaacatattatacatttctaccttactatcttcatttgaaagaattttgagcccaaatactaaaatcaatacaatatatatacccaagaaagtcggactaagtttctttatataattatctatataagaaaaaatgccacttgctgttaatcctgctaaaattgatgcacctattccacatcctccaaaggtatatgagtctaacttcgatttaatataaattctttcaatgctaatatctagataactttcttgagaatagtaattataaatctttctatatagcaggaattttgccttgactttatcctcattaatttttaataatcttctttggcaatccttatacttttctatcatttcaggagtatatatcttgaaattatttgaatttactttttttgaagatttattatattttagtttaattaaattatttttttccatctatattcttccttcaaaaataataacatcatcattttttattactatatagatattcaataaatatatattaattgcaaaataataggttcataaaaaaagtatttttgcatatctattattattattaactccttttttaagaattcaaaaaaggagctttcatttaaaacgaaatactccttttctaccatttacatattttctataagcctaataacataacttaatgtataaaaatctctatcaatctcatatctaatataatgtagaccttctaaaagtgttgattcatcaaatttttcttttagaattaataaagataacgtatttatttttccatctttagtatcaaaaacccttgatttttttataaattcattttccatcacatttgaaatcaacttttctaattcatcgcttatttcaacttctggcattgtatcaaaaattctgatgttcttgttatcttcacttatattcttagccttagtcacatcacagtttacaaatattgtgtttttgaatttagcatcttcaaaatttactccatctaaatttgctccttcaaatactgtgtcttcaaatttagcttctctaaacttacatccttttaaattcgaccctataaactctgctcctttaaaactacatctaaaaaaattacacttcttaaaatgagcccctcttaagctagcaaaatcaaaatttgagtttgaaaaattacagttataacatttacttcttttaagatttttataaataaaatttttattagttttctccgcattgtcataataaaaattttctggtgcacttctgtttatcgacattttatctatccttccgtattacaaataaatatttttagtagtttacaataacaatgtattatatattaataaaataataataacttttttataacttgtcctccttaattctttctatatttatctaattctatcatataaaactagataaatctttataataggaaaatttctatctcaaaatatatgtaagtaaatttagtagaatggaattctactaaatttctattaatttttacttaatattttgagatagattaaattttaatgtttttgattaattgtaatatctctccccctagataccaccttgtttgttgtttcttctctctcaacaaaagatttaactttagattgcgacatatctccagttttttgtatcgattttcccttctttttatatgtcaattatatcatctcctctcttatttatattattagttttgcaataatacttatgtaacataataataaatattatttgataaattatgttatatgatgtaatatattaatatatagttaaaaatttcagaatataaagttaaacttttatgctatagggtatagtttttctggattttttaaaattatgttaatgataatatttttatttatgggaggtattagtatgttaagtgaaaaactgatcgcaaagctaaatgaacaagttaattttgaaatttattcagcctatacttatttatcaatggcttcttactgcgaatctattgatctaagtgggtttgctaatttctttaaagttcaatctcaggaggaattatttcatgccatgaaattctatgattacatatttcagaaaaatggaactgtaactttagaacaaattgaaaaaccacattctgattttggcaatatcctaaatgtctttgaggcaggttatgaacatgagcaaatggttactagcaggctatataaaattgcagatatagctactgaggaaaaagaacattcaacaatcggtttacttaattggtttattaacgagcaagttgaagaagaaaatacatttaacactataatcaaaaagattaggagatgcgaaaataactctgcagcattgtatatgttagacgacgaacttgctacaagagtatatacgccccctacaacaactaatgcttaaattattataaaaaatacagagctagtaaagaattctttactagctcttatcactttattagctaaaaagttatagaatattccaaaacaaatcacaaacttttaatataaagttactgtttcaatgtgccctctagccaatttataaattgaattgctgttcgtggtgaacgagcattataccatcttacccatttcaatgcttctgcatgcaaatattccttctcaactttaatccctcttgcttctgctactccatctattatctttaagaattctttctgatcaggcgaatagaacgatacagtcataccaaatctatctgctagagaaagtttttcttcaattgtgtcattagcatgcacatcatcaccagatctttcgctaaatgtttcttttactaggtgttttcgattggttgttgcataaattagaatattgtttgatctattctctactccaccttctaatattgtctttaaagctgaataactagcttctccttcttcaaatactaaatcatcaacaaaaattataaattttaaattcttacttttaagtatcctaattatcttcgtaaaatcgcataatttatttttatcaacttcaataagccttaagccatcattgtaatactcatttataatagcttttacagttgaagatttaccagttcctcttgatccatatagtagcatattattcgcttgatatccatttaaaaactgttttgtattatctattataatctctttttgatattcataccctactaagttttctagcctaactggatctggtgattcaatacctctaagataaggtgctccatcttcgtgttcccatacaaacgctctatactccccaaatatgccagtcccatattgcttgtagaattctacaacgctctccaatgcatctccccaattatcacactttaatatatttacctttaacttatcaatagctttgcttgagatattacattccaagtcagaatcaaaatccataagcgacttaactatacctatttcaaactctttaacgtttcctttaataattatagcatctttaatcgcagaagattctatactagatatgtactgcaaagcatttaactcataatgcacttgattaaaaagtttatcacatgaattttgttcgtcaattattttagtaaatggattattatcgagaaaaatcatatcaattatatacttttttaatgattttccatcagctttgtttaatagttcataaataaaatcagtatataattcaatgccctcttccactgatatatccttactattaaggtactttagtagcgtcttatattttaataaaacactgtcatcttttagattcttaaaaatacataatgaatttatcattatgcttgctttgtttatttgttcaaattctgtatacatacttgtatgccccctttataaaatacgtatagtaatatattactactcttagtgttgttttactattcttttcttatttaaatcacaatgtgtatacgtaaggatcgattataaatatattcttcaaaatttgtgattaaatattattttattattctcatgcaatactatggagtataaatgaattgtataagatttcaagctatatataaaagttgacataaatgataatgatgttataattaatatgcgcattttagcgtgggagggtgagggagttatgaaagataggttgaaaggatggaaagattttttaaattaaaagaaaacaatgttacaattaaaagcgaaactatagcagcgctgacttcttttgttgctgcagtttacatcattatcgtcaatgccagtatattaagtgatggtggcatttctatggagcctctaatcatcgctacagcaatatcatcagctgtaggttgcttgttaattgctttaataagtaatactccacttataattatgcctggtatgggaattaatgcattattcacatatacaatagttcatactctaggcttaaattattgccaagcattagcttcagtttttgtctcaggattaatatttgtacttatagcaacaactccattatcaaagtttattattgaagctattcctcaaaatttaaaagaatctattacagtaggaattggtttatttataacttttgttggatttcaaaaatctaaaattatagtatctgattcttctactatgttaaaacttggagatattacaagtattcaagtactagcctttatattcataatgattctaacattaattttattccttaaaaatatacctggaagctttttaatttcaattatagtcggaactatattttgcataaagcttggtatcgttgaaacacaaggtataagttatactatgccaaattttaatgaatatagtaatatacttttcaaattagattttagtggaataaatacaattaaattttgggttggaacattttcattaactttagtacttgtttttgagaatattgggatacttcatagccaggtttcaggaatactaaaaaaatcagacaaaacctctaacgctatgatagcagtatcattatctacaattggatgtgcactttttggttcaagcccttctgtatcaacagttgaaggaactgcaggaataacagctggaggacgaacaggtttagtttcattaatttctggtatactatttcttctatcaattttttttataccgtttatttctatcataccagatgtagctttagctcctattttaattataataggctgtttaatgagtcagaacttaaagaatttgaactttaatgatttaagcgaactattccctagttttatgacaataatattaattccattaacatatagcattgttgatggtatagcattaggctttatattgtatcctatttgcaagctgtgttataaaaaaggaaaagaagtatctattctgatgtattttacatcatttattttcttattatatttcggtttaaattcagtaattaaataatattaaaatatatgaatccatatattttaattaattttctacactctaaacttaattaaagactctgtttattagatctttaagcgtaaatttattatctacaaaaacttataataaaaaactggtctacacaaaaaagtgtagaccagttttttattattgaaatactttttttcctagcaaagcaaaactttgaaggagcaaaaaacatttaatgtcaaatttctccttactctgtataagttctttagcttcatcttgagatattagaagtgcctcaatacattcatcgtcttcaaggtgttcatcacttatttcgccttcacaagtacaataaaccatagctaacgattcatctgtcattcctgcagaaacatacaccttatcaagactcttattattgataacttcaactaacctaagacctgtctcttccattagctctctttttattgtactaatagaatcttcccctggatcgatgagacctgctggtaattcataaacataatcattaagtggtattctaaattgtcttattataacaatcttattttcatctttatggtatgctgcaattattgcaccatctgccgtatcttctttatttccaaaaaactgtttttgtatagtttcattattttttctggatgctattgtccacgttcttatatttccaactttattttcatactctgcttcatataaactcaaaaacttagtctctactaaagattttactttagtaactttattttgtttcataagtatatagcctcctaacaattaaaatttaaatattacgaactttagatatccaataatcattacgcatagtaatattatacttcaattctttaccttatgcatataattaaaatctacgtatgccttacctatttctagagttaaaataatttcataaaaattattttaactctacataaaaaacaaaaaagggagtgtcgcaaaatgattaaatttcaatcaggagcgatactccttttcggtttaaactagcaaacttctaaatatttgaaatacaatattaattatttaatgatttctgatttttaagcgcactaaaataagcctagttaatttattccataattaggcagtaggtttcaattcatgaagatgattctgggttttttcattttgtatttttgaatgtaatttgttaatgttataaccaaaacaaagcaaaataaattcagtttgaacgctattttttccacgtgttaaaaatctattgaattcataatcactttttagaactccaaatgctccttcgacctgaatagatctattcattcttaatttagttccaaattcagttgtaatatttttataggatatttcacgcttttccacaaaagtttttgaaacctgcatttttctatttccttttgcttttgtgcattttactttgtaatcgcaattatcacaattttcgcattcatacacagttacttctgatttgtatccacttgcggattttctataaataatagaagtcggtattaattttctattgttatgacaaatataaaaatccgattcagcgtcatatttcatattttcgcgcttacttatatcatttttaaaacttctttttttccacttctcataagtttgtggttttatataaggagtttgcttatttgattctaagaataaataattttcttcgctttcataacctgagtctgcaattatattaagatatttacgaccgattttttctttcatattattaagcataggtattaatgttgctatgtcatttctattatcaaatattccgacaccggttacgtattcactttcaactgcgatttgcacattatatgcaggttttaattgactatttctcatatgatcatctttcatatgcatgaaagttgcgtctggatcagttttagaataactatttc

SEQ ID NO: 166 - DNA, 8025 bp, Clostridium beijerinckii
taatttggtttttagcataagtaaattatacaatgaatgtgagttcttcggaattcacattttttatatctaaaaaaatgagccgctacaaaactaactatgttagttttgcaacagcccctttttttatttttaaatattatagggggagtgaaatttatgacatggttaatgttaatttttgcaggtttatttgaaacgggaggggctataggtttaaagtattcagaaggatttacaaggcttataccaagtgtatttacgataattggtatgatagcaagtttctattttttatcgttggcattaaagggtcttcctttaggcactgcatacgcaatttggactggaattggtacagttggaactgtagctttaggaatgatactatttaaagaacctgttgagataattagactaatttgtattggatttatagtgattgggatagttggattaaagattgtatcttcacattaactaatcattttatagtaatatatatataggattattgaagaaaccaataaaaaaagtcttgtaaaaattgaacaatatgatatttacggagtgatataataagtaaaatataatataaattttgttaaaaagaggagaaaatttatgatatgaatataaggatatataaaactggtgactgtgaagaaataattaaattattttatgaaacagtacattctataaatgtgagggattatacaaaatctcaacttgatgcttgggcgccaaagaaaattaatatagctaaatggaataaatcgttttctaaagattatactattgtggctgaagatattggtagtatagtagggtttggtaacttagatcatactggatattttgacaaactttttgtccacaaagattaccaaggtgaaggaatagcgacaatgattgctagtgagttagaaaaatattcacaagaaaataatattaaagttataacagtggaagcatctataacagcaaagcctttttttgaaaaacgtggctatcatatagtgaggcagcaagaagttgaaagaaaggggcaattattaactaattttgtaatgaaaaaattattgtaagtatttatacttaccttattgttcaaagagaatttgcggtatattttatagctaaaataacgtgtaattttagaaaattgagcgttaaagtaaattaaaaaggcactgcagaagtgccttttaagaaaaagtcaaaagaatattattatatattataaatttataatcatatttaagaggggctataggaatttcagtggagttagcgggtattcgaataagttgttgtatttttctatcagcatcgacaactattaatagcccttcaacataaggctcatgattctggactttatagctaacattttctcttaaattcagatctttcatggcataaaagccctgggaatacgtttttaactgagcggtaattgttattgtattaaaggtaaataataggagtaaaaagatagaaagagtatatatgaattttttcatttgataagccttctttcataattttaaggtatatactatataactaaaattattatgtgaggatgtaataaaaatattcattaaaagttatgctctaaaagtgagaagccaagttttatatttgggttcttaagtttagagcattttatattgcgatggaggaattttacacataagcttttgagtttattaagtagtctatttatagtagagagggaatgtcgcagatgcaagctatttgataaaaaatgtgcatggtgtatttactacgcactttccacatacttcactacctatactgtttggttcatcaccagattcatcggtgtaagaacttccaaactctgtatataattctgcatttttcattagtaccacatagcatttgtgtctatcatatccatctaaagttaatgcacctgatggacaatgttttacacatacaccacagcttccattctttttatacaagcaaagctcttcttttaaagtcgaatctgcttttacatctagatttgttacaatggtgttataccttccgcagcatccaacactagttataagcatattattgataccaaaggttccaagaccagctgcttttgcaaaatgacgatgagaccaattgctttttaatatcttctggtcaaatgtagaagcttctggcgaaatatctgcatgatatccaagtttccgcagttctgatatcatatattcattaagcttaacaaacattgcattagtttcttcataagctaatgcccattcgggagaggaaacatcaccaggagttccattggttttagccaattctttagtgaatgggacaaagtatgctatgacaattgatgcatcggaaagtacatcggttggtaatttatgagttggtgtaataagccccttaaaatttaaaatgtaaggatcattagcatcagcaaaacctactaaaggatcaccccatcttgttgaaatattatcttgcctttcatattctttaataaagttttttatcaatttagtgattttttttttcataactaaagcaaatcctctctttatataagctaattcttttaatatttataattttaggtaagttcatacaataagtacggctactattttggaaatctatatagataaatcaattcagaattaggcttatcagataaagatatttacaaagttattaaaactttaagtttgtatcttcactagaaatcataaatatatttgtggagaaaacatttgaaaatgagctgttaaaggttcttagctgtaggttgttccattttagcttgtcaaactgaaagttggagcatgctaaagtggctacaacctgctgcttagaaccttcagcaatattttcatagcttttcggaatcaaaatatttatgatttcggtaagttatcacataagtctaattataaatttgtgtatctatattatatcgcttctgttaggtaaatctttgctaaaatacagttgttttttagtctattttttgatgtttcttctaaactcagtaggtgatattttttctgagtttttaaataccttggtaaatgatgaattgtgttcatagccaaccatttgagaaatttgcaaaactgttaagtttgtatttaaaaggagttcttttgctctttttactcttaaattttgtatgtattcagtaggagaaacgctcatattatttttaaaccattcactataataactgacgttgtaatgctctatatctgctagcttttttaaatcaatatcttcggtaaaattatcattaatatatttaatggaattaggtgaatttccagtagtaataaaattataaaagtagaggaataagttatttatagagctagatgttttgtgaacatcagcttcatttaacaataaatatcttattgctttccatttttcatcaaacaaaatatcctgtccaccacacattttttccatgtcatatttgttgagcattttatcaggtatatctaatactaggaattcattagtattatcagcattaaaagtatgtttgcaatctggaggaagaaagaataatgaatcatcttttaaatctaatttcttataatcagtttctatagaaagggcacctttaagtggcaagataagttgtccatattcatgagcatgagtatcacttttaaaactatatattctacgctcacattttatattattcaagagtattactcctttcttttattataatttacgatttatatattaaatttattatatcataaatatggaggtgctattttagataccataacaaaataagctatcatgatgatagccatatagttattatttacattattttgtcatgaaaaatataggtttcgattaagtttatacattttagctttaattgagagcttggctttatagatttttaatgtagatttattatattgaacatatacactaatatttttttgatttttaatcatatgttattaaatttcttttttctgtattgagaaggagtacaccctagtgttttatgaaatatttccgtaaaatagcttgaacctgtaaatccacattgaagtgctatttcagtaactgaaagggaagaaatctttaggagttcaatgctcttttctagacgatattctgttaaataggaaacaggagtcttattcaaaataagcttgaaaatatcacaacagctactacgacatacatttccagcagcggcaatctcatttaaagtgattcttttttgataatttttctgtatatatcccgtcatattatgcatagcttcaagttttttgtcatcagctgtttcttgaatggaaatgctatcttttatattgttataaaggctgaaacatattgtattaaaaaggctcatgacatgtaattcaaatccatccttttcttcattacataactcataaacgtttttcaaaagttcaatcaagtttctttgccaagtgatttcgggatgcaatataaaaaatggattggatgtgtcttcacatactggcagtatataagtttccctgattcttgtaatgctagaaataatggatggtggaaacaaaatacatataaaactacaatcagagccatcagcagaatatccataatgcatctgctcagaatttataaaaattgcctgcccttcttgtaattcatagctcttaccatttacagaataagacattttaccatttaaaagtaagatgaattcccagtcagtatgccaatggttagcagcagccatagctggataatctgaaagcaaggactttttcgcacgaacaggaaaatctgcgaagttataagatacaacttctgagttatcatttaatagtgtcatctttaacatagtttcccctccaaacggtatgaatatcaattaatatactattgttataaaaatatagcttattcttatatttttagtagttgttatggaatattattataatatagacagattcataaatcaatttgaaaatagcaaatattcaaaaggttgaaaaagagaaatgaaagccaaaagactaaacttagataaagcaaatatagtatttattgggcttgttataataaatatatgtgcatcctaccttgttggcagcacaggaatttatgcggctacagcttttcgtgaatatggcaggatagatttgtttaatgctatgtttgtaatagaaccactagcaagaagtatatcattacttatttctggtagagcaggagaatattttggacgtaaacaattgtacatatggagtgtaggggcgtttgctttaagcgttggaattagtgcagcagcatcaagtgggactgtatttcttattgctagaggagcttcaggtttcttttggggactattttttgcaaatgtatttactatgataaacgatatagtatctgaagaagagtatccagttaggattggaattatgcagacagtttattcattgacgctcattttgggtccagtactttgtggaatatttacagagcgatggagttggagaatatcccttgctatactgtttcctttatttataattggaatgatatttgtgggattttttatgccaagaagtaaaacaaaaaatggaatcattataaaaagcagcataaaggaatatgataaaggagaaaatcttcatataaatagaatcaataaagaagaattatttattgtaaaattactaaaacaaaagggatatctaacaattattttaattacttttatagctacatgcatttcatgtagtggtaattacataccactttatgcacagacagtattaggagcaaacactaccattagtgctgttgtccttgcgccttgtaatatttttgttatgatattatcaagtgcctctggcatatatatttcaaagaaaggttgtacaaagacgatttttatattgatgtcaggcgctactttaataggaacacttatttatgtattaaccttgtttatatcaagttaccttgtgattatactatccactgcaataattggtattggagttggaatacatcaagttgttccattcgcatttgcatagaggcatttagatgataaactaattgcagaaggaatatcatttattagctttgtacaaggcattgcaggagttattgcaggaatgatatattcagcaacaatgagaagtggaatagcattttcattggcatttacagttgtttatagtgtttctttaatattaattgctatatttaaatacaaagtacctcaaggtgaagaataaaaaaatattcttataaggtagcatatatattgcaataataagtttatatttaaagctttgataagctgacaactcaattagaaccacaattttgaagcttaattattatatataagtaattgtaaatgttttaataaataatgtaaggtgaatttttagacaatctatttggagtgtgaaagataagcattttatactaataaagttttgctgatgttagatattaataaaataattatatagataaagaaaaggggaatagaaagatgaatcaaaaggaaagaatgctagcaggattaccatataaagcttggttagatggacttggtgaagaaagaatggagaataagctaaaaatacatgaatataatttacttcgtccagatgaaatgaatagaatggaggaacttattaaagatattttaggtaagactggtgataaagtttgtatagagcagccatttcactgcgattatggtaaaaatattgaagtaggcaataacttttttgctaattataactgcacgatattagatgtaggaaaggtaataataggtaagaatgttttgtttgcacctaatgtatcaatttatactgctgggcatccaattcatccagagtcaagaaattcaggttatgagtatggaattgacgttataattggtgataatgtgtgggtagggggaagtgttgtaataaatccaggtattaaaattggaaataatgttgtaattggttctggaagtgtagtgactaaagacattccagataatgtgatagcagtaggaaatccatgtaaggttgtacgcgagattacagaagaagaccgcaaatattattataaaaacaatgagtttgatgttgatgattacaacgtttaattgtatttaatggatcagcgtagaaattttaagttaataataaaggaagtgcaagtatgaaaatagaacatgtagctatatggactagggatatagaaaaattaagagacttttatattacttattttgaaggagttgctggagataaatatattaatcataaaaaacaatttgaatcatattttattaacttcgattcaggagcaagactcgaagttatgcagatgccaacaattccttcaaatttaaatgatactattaatcaatatattgggttaattcatattgccatttctgtaggcagtgttgaaaaagttaataatcttactgagtcattaaggaatgcaggttatgaggtagtaagtgaacctcgttatactggagatggatattatgaaagttgtattttggatccagatgggaatagaatagaaataactgagtaagactaataactttaggagatataataatataaagaatattttacagatgtagtttttaataaaaatatgtgtttattttttagtgaaaattgatataatataagtaagattctaaatctatgatttattcagtaaaacttgcatatagtgtaaggaaatagtataaaaatgaaaatagtgaaaaacatactgcaatatgcttttcactatagtatataattctagttgcttaggcaactggcatcactaagatttttatttaggggctgctccaaattggcttaagtgtttggaatagtattatgtatgatattttatggaatactaagtgcatagatattttaaatatagggtaaaaacccttgcacttaggagtgaatttatatg

SEQ ID NO: 167 - DNA, 7769 bp, Clostridium beijerinckii
gttattaatatggcattttttgtaatgaaccttgataaaaaattgagggtcattctacgccattttacaaattactatattttggaatactacatataaatatagggggttttaaagcaccccctatttattttataattcttatatataagtcaaactataattagtataataaatttatctaaaaaaaagtaggaatcaattagagattcctactaaattatttcagtattaagatatatttagattacaacttatctatctttgcctatgtttaaagatataaacatcttattaatcttataaatatacataatcattcattacaggctgtaagcctttagacttaattgcttcatacacttcatctactgatctgttatctgcaatttcaaattgattatctcccctgtcttctgcatcttccgcatggcttcctattcctgtacttacacctgctgaaatcttagtagctgctaagccaattacattattacgaaatctttcgcattctcttgtagaaatcgtaatattagcaaaaggcataaaaagacggtacgctgtaatgacttgcaagagttgtttctcatgcacatcctttggattaattttatcattattaataattggtcttaaccttggacatgaaaatgctatctctgcatgcggatactttctttgaagaaggtatgcatgtacccctgtcgcaaaagcatcttttctaaagtcatctaggccaagtaatgctgcaaatccaacaccacgcatcccaccttttagagctctttcttgcgcattaagtctatatggaaatatgcgcttatgcccttcaagatgaagtgtttcatatttatctgaattataagtttcctggaatacagttacaaaatctgcaccgcattcttgaagatattcatattcatcagaattcataggatatacttctaatcctaccatcttaaaatacttacgtgctatcttacaagcttctccaatatattttacatctgacatttttctgctttcaccagtaagcagaagcacttcctccaaacctgttttagctattgcctgcatttctttctctatttcatcgaaatttaacttcgctctgcgtattttattatgacagttaaatccacaataaatacaatagttctcacaataatttgctagatatagtggtgtgaacatgtaaactgagttaccaaaatgctttcttgtttcctctttagctaattgagccatctcctctaaaaacggcatagctgctggtgataataatgctgcaaaatcttctatggtacgataatcattatccaaagccactctaacatctgtttctgtatacttattataatcataagcttccatgtgattaattactttatccattacatctgattctaatacttccatcccagccatatattccatgtgatttatacgttcttcgctcatagtctgcctcctaatcttctaaaaacccagttaatggtgatgacgcagaagcacctttatctagaactctacctagtcctgaaagatatgctgcacgtcctgcctcaattgcttgtttaaatgctcctgccatagctggaatatcaccagctgtcgcaattgcagtattagccataacagctgccactcccatttccatagcttcacaggcttgagatggtcttccaatccctgcatccacaataattggaagatctatttcatctactaatatttttatgaattcttttgtagctaaacctttattagatccaatcggtgatgcaagaggcataatacacgctgctccagcattaactaaatcacgagccacatttaaatctgcatgcatatatggcattactataaaaccttctttagcaagaatctcagttgctttaatagtctcataattatctggaagcaaatattttgagtcatgaattatttcaacttttacaaaatcaccacaattcattgctcttgcaagtcttgcaattctaactgcttcttccgcatttcttgccccagatgtatttggaagcaatgtaacaccctctggaataaaatccaaaatattttcacctccgcttgtattagcgcgtcttaatgccaaagtaatcatctgtgcgcctgcattctcaactgcagccttaattaaattcaaattatattttccagaccctagtatgaatcttgatgagaattcatgtcctccaagtgttaatacatcttttttcattccaatactctcctttagcatttttcagcaagaactagcagtatataaaattcgattattaaaataaattaatatttataaccaaattattaaataaataacttaatttaaaagcttgtccttttctaatctagatcttgcagtaaaattattgtttttattgttgataatatacattagtgatatttctgaatttattaatgcatcagccgcctccaacaaagctaattacttctaaagaatcaccatctttaatatttgtctgcttatattggggttttggcattatttcaccatttagctcaactacaatcttatctattaaatatccttcactgataagaaagtcctctaacgataatccagttgcattatctgcctcttttccattcacttttaccatttaatcacctcttaaatatttaatatgactaaaaaaggccacacgaaaaaatacacccaaggtggtgtaccccttcgtgtgaccttcacactctgtaaatgattatatcattacactaagttggtgtcaaattaactttaattcaaaatgcattacaaaatcaaaaaacaaatttttgtaatgcatttttatcttattctgactatttttcattatatattttataagcattctttaataagcctttatataaaagactacttccaacaagtgaaataataatgcaaattccaaatataattacataattcctcaatattatggcagctactactaaaccagctcctaatataaatataataagcataattaatagaggtatataattatttttaaacatagctttttcattttcccattccaattttggtgatttaaagtctatatataatcccaataaagttaccataagtattgatccaaatgaagatatcgtcccgagcaatattatgataggacttacgtttactaataagagtcctaagacaactataaccatcccaaattcatttataaataatgatgaaagaatcttagagtatagctgagttttatattccacaggaatatacttcgatacaataaaatctttcccctctcttgaaagtgcacttgcacctgctccacctgacattatacataccgttccacctacaaatgcaattgctatggtaatcgcattccatttgggactactatttaataaatacctatactctgatagtttaccaccggaaaaaaatgcaacacccattactgccggcatgtaaaacatcatcgctatgcaattaataaagaattgaggagttctgaataagattttaatatcttttataattaatgcttttaactttgaattttcttttattattttatctgccttaccgttttctaaaatattttccctcttgctataagtttcagaaatacctattactccctttaaatataactttcctcctatataataatatattatgaaaataattaaacttaggcataaagacataagtatattaagtaagcctctaatgtcattattatataatagcccatttgaagaaaatctacttgttatgaaaatatcatttagcgtactcatcgcgctgttatttccatctgaaaatctttgaatcatttgctgtgaatttgtacttcttccagaacttgatgtaaaaaaattgaatcctactatcaatattagtgatgcacaccctgtaaatactctaaatgcatctttatgcttagataagctagtgaacctcataagaatcatgcatattaacgatgccaataccatcggtataataggagttattaataacactataattccatataaataatacaagaagcttgcctttgacacaaatccatagactataagtggcaaaattaacattgatgtatacacatacatattaattaacactgccataaactttccaaatactatttcactacttttaaaaggaagtggtaatataacttcaatatcatttgaaaagtataagatatttattattgtatacattccaaagatgaaagaaacactctccccaattgacaatattattgataataatattccttcctgtctcatagcatgaagcggtccgtagccttcacttattattacagtaaaaggcatagataacattactacaataaatatcattagcatcactgcgaatacaggtttcattttcttactactagcaaacatttcctcaaatgcatttcttataaaatattttgttattatcttaagcctattcatcttgaatcatctccaaaaacatctcttctaaggattcattctctttaaactcttttctcatattgcttagtgttccattaaatattaattgccctttattaataatcgcgactttatcacagactttctctgcaacttccaacacatgtgtagaaaaaatcacggtatttccttcatcggcatgttctctcatcatttcttttaatgtaaatgctgattttggatctaaacctgtcattggttcatctaaaatccaaacttttggcttatgaatcaaaactcccataagaaccaccttttgtctcataccatgagaatatgaatgtatcttatctcctaatgccaactccatttcaaacctttttgatatttctcttatccttgataatctttcttcctttgaaaccccataaacatcagccatgaaatttaaatattccattccacttaatcttaaaaacatatccgggctatctggaacataaccaaattgctcttttgctctaactggctctttactaatatcaattccgttaatttcaatttttcccgatgtaggcgatattattccagttatcattttaatagttgttgtttttccagccccattaggccctaataatccatatatttctccatccctgatttccaaatttaaattgcttaccgcattataatttccattataactttttgttatattgcttatatttatcataaatttatcctctccttggaattattatactaaaactcggtcttataacaacttaaataaatcttaattttagattaattattcatctccttttaatatgcatacataatcctacaattaataaagctattattgaaaatttaataaggagtatataacttctaaaattattatatacatccttaaaaaatgtatttaaataaatttaatcctataaaaaacctctttttgatgtttactaaatactacgctaccttataatttagataacatttttcttaattcaccaatatcatttactggagccatacacgattttcctttacataaataatatgtagatttttcatttataagatcatattccttaagaaatggtgctaaattttctattttatttctattttcatcattcttaattattgttgttaaattaaaaatagacctttcacttaataaatctttgattttttcttcttcacctttatcattagtaacgcatactaattcttctgattcatttaaagcaaatgatgcagccattaaaaagaatgaatgatttatctcttcattaaatactgagccacaaataaaattaaattgtttctctgccatttcttcaagagttaaatcaccagtaagtcttgcaagctttattaaattgtaagctgcaacagaatttcctgaaggcatagcaccatcaaaaagttccttaggtctagcaattaatttttcactatcctcaccataaaggaagaatccatctttttcattatcccaaaataagttaatcatatccttatttatttcaatcgccttatttaaaaactcaatatcatagctactttcataaagctctataagtccaaaacaaagaaaagcatagtcatctaaataagctttatgacgcgaatccttatctctataccttgcaagaagccttttattttcgtccatcaagttattgaaaataaactctactgctttcttagcatattcaaagtatctttcatcctcaataactttataggcttttccaagtgcagctatcataagtccattccatgaagttaagattttatcatctttatgtaattccgttctgtcacttctatattgaagtatttgttcactaagtaactttatcctatcatctgacttatgaaagtttttattttttattaaattcggaatgctcttgccctcaaagttcccatcagaagttatgtcaaaataatcattaaaatacgtaccatcttcttctcctaaaacacttaaaatttctaaaggttcaaaaacataatattttccctcttcaccttcgctatctgcatcttcagcacagtaaaatccaccctctttactagtaagctctctaaatacatattctagcacttttgttgcaacctctttgtaaatctcattttttgtgacctcatatccctctaaatatgcaatgacaagcaaagcattatcataaagcatcttttcaaaatgtggtaccagccacttactatccgtagaatatcttgaaaaaccaaaacctatatgatcaaatattccacctctatacatagaaatcaaggttttttcagccatttctaaagctttaatttctttatgagatttataatatctaagcaaaaacattgttatatgaggcgtcggaaatttaggtgcatcaccaaagcctccatacttttcctgaaaagcgtgtaaaatttgattatacccattttttaatgtcttagatgtcaacttcaatttgcttgtttcaccatcaaaatagccaccaagttctgataaaatactatcaccagatgatataagcttatccttattatccttccattgcttatttattgaatttaaaatatccataagtcctggcatattatatttagcctttttaggaaaataagtacctgcaaaaaatggtttttgatctggagtcattatcactgtaagcggccagcctccatggccggttaaggcttggcaaactgtcatatatacactatcaatatctggtctttcctctctgtccactttaatcgcaataaaactatcattcataattcctgcaatttcctcatcttcaaatgattcgtgggccattacatgacaccagtgacaagttgaatacccaatcgataaaaaaataggcttatcttcctctttagcttttgcaaatgcttcatccccccatgaataccaatttattggattattagcatgttgcaataaataaggagatttttcatttattaaattgttggcttttattgtagataacatataaacaacactccttttatactttattaaaattatctttgccacgctgaaaaaatatatacacttatatgatacatacaataaaaagcttattactttattattttcagattaaaatctttctacctatccatactatactagataattgcgaaactcattgataaaaatgaataatgattgatttgaagttgcaaaaacattattaatggatttaatggttcctgctatacaaatataatagttgacttcttaaaaaagggcgcac

SEQ ID NO: 168 - DNA, 7568 bp, Clostridium beijerinckii
gatgagatttcccatagcataagctagtaagaccccttgaagactacaaggttgataggtcagaggtgtaagtatggtaacatatttagctgactgatactaataggtcgagagcttgaccaatataatcaagttgtaatatacattaatagaggaagctcgactcactggcgttcgctgagtaagttcgagtatccagatataaaatttggaccctcacttatgtgcaattttgaaagaacaaattctttcaaatagcgttccgcgatagctcaatggtggagcactcggctgttaaccgataggttggaggttcgagtcctcttcgcggagccaatatctcgtgatgatggcatagaggtaacactccttcccatttcgaacaggaaagttaaggtctatagcgccgatggtactgcatgggagactgtgtggcagagtaggacgttgcgaggtaagtattaaagatagtcattatgactgtcttttttttatacagaaattatgaaataaatagtatatttatcataagaaggagtgctttaattgtatataagtgaaacaaagattgtagtaagatatgccgaaacagataaaatgggaattgttcatcattctaattactttatttggtttgaggcagggagaactgatttcataaaaggaagtaatataagttacagtgaaatggaggaaaatggcatactaatacctttaactgaaagtaattgtaaatatattataggagcaaaatatgaagatgaattaatcataaaaacatgggttaagcaactaacgcctgttaaggtagagtttaattattccgttatcagagaaaatgatcaaaaagaaattgctaaaggaagtacattacatgtttttgttaacaatgacttcaagataattaacttaaagaaggtcaataaagaaatatttaataagttagaatctttaatataaaatatattgtgtgaatctagaagatcatatcttaaattaagaattttagatatgatctttgttttgtagcaggtttattcattaaccaatacttttacgatttctccaatataaattgtgtgataatctttttcaggataaattttctcatcaaaagaaggattatcaaagttttcaggtttaatttctgtatgatacatctttttgcatactaccaccatttttgcttctttaaagtaagtattattctcatcaaaaattggagttaaatttgctttttcaactttgttatcatctcttccagaaagacttccacaaatatttaaagcttttctataatcttcgctaaaaaatgataatgtaaatgtatcatttgaatctacaaattgttttgtataacgtccaggtctaatgtatacagtagctgagtttttaccccagaatacgcctagtcctccccaacttgcggtcatggtattgaatttattttcagtaccagctgtgattaataaccattcgtgtccgatgagagtgaatggatttatatttaggtttttaatttcaatttctttgaatgacatatgcttgcctcctataaatttttttatttaataatttatacttattttaaagctattagaataaaagttcaattacataatttttaattttatataattacttaaatcacttttttaggaaatcgataagtgttttagcggctattgacagattatttgaatttttataaatcacacctatatatctaggagggatctcgtattttagaggaatttctaaaaggattttattttcaagctcatcatttaaaaactcttttataacagaagtaataccaagtcccatttttgcgcattcaattaaaaaatccatattgctggcttcaatatctggaatgatattgatattatgtttattaaaatagctttctatatgttctcgtgtagcgttaggattttcaagaagcataaaagatccctcagctaatgtatcatcagcaggattcaagtttagtttttctaaataagtaccacttgctactaggatatcttgaattttgcacagccttatgaaattaagatcagcttgggtggaagtagtaccaatgatgcctaaatctaatttctcttcttgaactaactttattgtatccaaagtaggtttatttattatcttggtcttaaaataaggatattcttttataaattcccgaaatctaggtaaaaaataattttttccaatggttgtgcttacacctaaattaattgtaccagtttctttattttttagcttttccaagatattcgctccaaggttaagttcatcaaaagcattttgtatgtgatcaaataatatttttccttctggtgttagggtcacaccttttgaacttctcgaaaataaggttacattaaaagaagtttctaatgtttttattgatttacttacagcaggctgagaaacaaaaagaatttcagctgcatgagatatattcttgcatttggctactgtgagaaagactttataaagatttagatcaaaaatcatagtataactcctaattatagtattcataactaatatatatttttattatacattaagacaagctaaaatagtaataagatagaaaaatatttaaatttatattaaaaatataaaagaaaggaagaacagattatgaagattggaataattggaatgggagcgataggtgggtatattgctgctatgctttgtagaagtaaagaaaatgttaatgttgtagcgtatggaaaaacactaaataaaataaagactgatggaatttcattggaaagtgaaataaatggaaattttactgtttttcctactctcgcgacagataattcagatgaaattggtgttgttgacattatctttgtttgcgtaaaaggatattctttaaaggcggcagcaaaagcaattttacctatggtaggtgatcatactttaattattcctataattaatggggtagacggcggaaataagttatattcttacttaagaaaaggaaaagtaacagatgctattatgtcaattagctcaaaaattgaaggtgatggagttattaagcatactagccaaaatactagaatatttatatcatctaataaaaaacgccctatgtataaaagagatttagaacggatctataatgttttaactaaatcgaatattttatgtgaggtaagaagagatgcagaaatttttgcatggaataactacgtatttaattgtgcttttaatgtaactgattcatattacgatgtgaaagtaaaaggaatattagaagataaaatgaaatttgaaacattttgtaatgtagcaaaggaatgcgaagaagttgctagaagtaagggaataaatcttcatcctaatatttatgagaatgcaataagtacactaaaaagcttatctaaaaaaagtataagttcaatgcatagagatgtagtatctggaaaaaaatttgagcttgaattattttgtggcgatttatgtaggatgggaaaagatttgggagttcctaccccttatactcaaaaagcttatgaaaagctaagagttttacaacctgtgtaagatattctgaaacacatataataggtatgtaaagcattttcttaaataattcatttatagttcacgaatatgattatttagtttaaaataagattgatcattaaaaattcactagtgtgttataatattagcaactataatagtttattattttgacttatttacggaggtgaatttttagtgtgatttaactcttgcactaagatatattatggattataaaaataaagtatgcataattactggaggagctttagggataggaagatgtttaacaagagaattttcaaatgtcggtgctaaagttatcttcattgataaaaataaagaagcagggaatgaaaatgtagaatatataaaaagaaaaggtggagaagttgaattctttttaggcgatattgcagaagaggatactttatataagtttgcagagtttataataaaaaaatataaaaatatagattacctcattaataatgcttgtattaataaaaaaggaattatttctaaatgttcatatgaagattttaattatgtactcaaagttggagtaaccgcgccatacatattaacccagttacttatgaataattttaataaaaatggtgcaattgtaaatatttcatctactagagcctatatgtcacaatctgatacagaaagttatacagctgctaaaggcggaattttggcattgactcatgggctttctgttagtctttctaataaagtcagggtgaattcgattagcccaggttggattgatacaggttcttattatgatgaagaatatgtaccaaagtatagtgagagtgatttattgcagcatccatcaggcagaatagggaatccaaaagatatagcgagagcagctatgttcttgtgtaatgaagaaaacagctttattaatggagaaaatattaatatagatggcggaatgacaaaacttatgatatataacgatgataatggatggagatatgatagtaattagtatttaatacattataaaaattttttaaatcttatgtatatagaagttattttctatatgcataagatttttttttcggatttacatatttataattaggtgctggaataaacttcaaatataaaacatagtataaagtagagtaactaaaggaggaataagagatgaattttttacttactaaactaaatgatacttttagggataagaaagcctattttttcattgtactgataatgttttgtttaggaatatcttttgggctttacactgttaaatatatgggggaatcagataaaacggatttaacaaattatttttttagttttactaattctatagatagccatcctatcaattatggaaatttattattcgaggttataaagaaaaatatactaattattatacctatatttatattaggtttaactttttttggagctcctgtaatattaattttggacttattaaaaggttttacattagggtatactttttctttcatgataactacttttcaaggaaaagggatgggactagccttaatatctattgttcctcagaatttaatatatattccatgtttcatagcattaagtgttattagtttatctatgtctacagaaaggtttaagggaagatttttcaaacatggaaagataaaagatccttttttagatggtgtattaaataaattaattgtcatcctaatattatttacaataggcatattaattgaaacttatatatcaccatctttgataagatttgtggctaataaattctatttataaaacaaaagatgattttaaataaggaaagaaaaatgacgatttggtcgaatgctaatcataatcaatggtataggagttaataatgataaatagtataaataattataaaaattatttgtttgagagtggtaaaagtgagaatactatatatgcatatgtaacagatgttagtctctatttaaaattcttaaatagaaaaaagatagacttatatgaaagtgataaatcaacggttatgtcatatatacaaaatctcactaatcaaggaaaatcagaaagatctataaatagaatagttataagtctaaggaatttctattcatatttgaaaagtgaaactttaattaaggaagttcctaaaattgaatataagagttcaaaaaataatagaaaattgccacaaattttgaccattgaagaagtagataagataattagaatagtggaaaaagactgctcaaaaggaattcgtgataatgcattgttagagttaatgtacgctactggaatgaaagtttcagaacttattggattaaatgtagatgatgttaatcttgatttaaattttgtaaaatgtacagataataagcattatgaaaggcttattcctataggaagaagcgcttgtaaagcattaacagaatatctaagcataaggtataagatagcacagtgcggtgtttctaacctttttgtgaatttaaatggtaataagcttacgagacaaggtatttggagaattgttaaagaatactctagaaaagctggtatagataaagacgttaatttaaacactttcagacattcatttgctgttcatcttcttcaaaatggagcaaatgttagggctgttcagaagttactcggtaatcaggtattaacatatatggatacgtactatgagataatcaataatgataaaataaactatatatacatgcatactcatccaagagcttgagaatagttatttgtacaagaaattaattaaaaatattacgggagtttccacccgtttgccaccacttatcaaattggtggcaagttttatttaaggatgaatttttgtatttgtagattaatatttatttattaaaatttacagaaggaatattccaacttttgtataattaacttatatgagaggaggcgatatttatggtcaaaaaggaaaggtgcatatggatagcgtagcctttatatacaattagttatataagaggaggaagattaatgttattaagttcaatacagaaatgctctaagtgtgatataagttttgcatgggaatacactactccagaaacagaaagagtattgaattttgaaggagagacttcatcaatagctagtgctaaactagtaagtgctaaagaagggaaatatgatattaaagtgaaatgtcccaaatgtaaagctttaaataagttttatattattgtgccaaggtgtaataatgagaaatgatatagagagtaaacttaactaagaactctagaaatagggttctttttgacgttataaaattttattttaaatttaaattgatatagaaaaagtatagaagtaacctaataataatatttatagatgattgtggttataggtaattaatggtataatcttaaatgcaattttaattaataatagattggggaggaattttttatgcatccaacaagcactacaatattaagtgtcatactaattatagtatatttaatattatcaatagtaatatttgctttatcaatatatgcattcatattatttataaagctagctaatagaggtataagagcacttgacatttatataggagaaaaagaaggacatgcaaagggagattattatataaatagcaataaatatgaaaattattaataattatcaattttattgagagcatatataagcaggtgagataatgaatgataaagaaattgatgatatgttttttaaaatttatgattacgagtggcttgacaatcaatataaagaagtagctagaaagtcgtcagcgtatattggctttagattgtatataaagcttaaaacacttatcacttcggttttaaatataaaaatatgatatttattataaataagataaactgtaataatgctttagcattattatttaaaactataaaaacaaagagcaacatacataggggtaatatgaatgttgc

SEQ ID NO: 169 - DNA, 7502 bp, Clostridium beijerinckii
tcattattaacatcatcaagtgttgcatttgatacttcaactaattcggctttcttcccctctgattctattccttctagaattaagtttgccattttttctgtatttcctgtttgactaaaatatattattttcatattaatacctcccaaattatgctatctacttcttaaattgtttttttatttaacttctgacattattataactttatttgtttttaaaaaatgtgattgaaatcaaatctcaatagaatatttcatttttctgccactcttaattatgtattgatagatttattatagtagccttaggtctagacatagattcaattgaatattttatcccctgagttcctataccagaagctttcacaccaaggaatgggaaattatcaggacctctttctgttttattatttacttgaactgttcctacttctaacttatcagccacataaaaagcattatctatgttctttgtaaatacagcactttgaagcccatattctgattcattagctatttctatagcttcatctttatctttaaccctaataattggaagtacagggccaaatggttcttcccatgcaattctcatgtctaaagtaacattatcaaaaagtgttggataaattaaatttccatctctgtttcctcctacaattaagtcagctcctttaccctttgcatcttctattaattcaataacaaaatctgcagctttagaactaataagaggtacaacatctacatctttctctaaaggattccctacagtaagcttttccatcttttctttgattttttctaataattcatctgctacttcatctactactaaaattctctttaccgctgtgcatctttgacctgaatatgaatatccacctgcaactatattacttgcagttagttcaagatcagcatcttctaaaactatagctgcatccttgccacctaattccattaaaagaggtaccatactagtcatcttagaaattctagttcctacttctgtactacctgtaaagttgatgaaatttatccctttatgagtagtaatataatctccaatttcacttcctttacctgtaactgtatttagtactccggctggaacccctgctttttcgaatattcttgctagatataatccacataagctcccttgagttgctggttttaatacaatggaatttcccgccattaaaccaggtgctattttagaagctgataaatttattggataattaaaaggagatattgcaagtacaactcctaatggttccctttttacaactgacatcttattattcttaaaacctgggaagctatctcctggaatactttcaccagataaattcttagctgtatctgctgtaaaccttataaaatctgctgttctggatacttctgatctgcagctttttctatcttttgcaatttccatcatcataagttctgataattcatctatattttccagtaaaatgtctgatgctttatataatatttctgctcttgcatttatagttgtgttattccactttctttgagcttctttagctgttactactgcagtatctacctcttcctttgtcatagccggtactctacctaacaatgaattatcaagtggtgattttatctctacaaagttttcacttctgctgctaacccattccccatttattaaatttttaaaagtattgtttttattttttatatgattaaacataatcaatttcctcctcatttgtttatactttgttactcttttgttatatctactcctgcttcaaacatttcaaagtttatattttccttttcaatggccattgatattaaattatgataaacagttttcataaatggcactggtccacaaaaatagaagtctccatcctttggcaagttatctatcatccatttctctgatatcctgccttgtacatcaaaatcttttcctaatttttcattttctttaggacgtgtataaaatacattacttttgaaattattattatgtaattttactgtttcttctttaaaactatgatgagttgaattaggtatgctataaatgaagtgaatttttctatcactgtttactgcatcataagccattgtaagcatcggtgttattccaattccccctcctattaaaactagtggcttttcactatcctttaatatgaaatttccaagaggtgcagttatttgaagattatctcctgcctttatttcatcacatagttttttgcttaagtaaccattctcttctctctttacacttattctataaaattcttcattagaattcatggacaatgtatattgtctaggtttagtaaaagtattatcttcattttttattctgacagttataaattgccctgctataaattcaggaagcttacttccatctaatgattttaaatagaatgatgtaactacctcatcttctttaactgttttatatacaaggaagtctttaaatcccttccatttgttatttgaatttatcttattagaatctatcattgaaatcctcctcatttttcttcagttctttattttaatgcttgtttttcttaagcttgtttcatttagctcatgagcctattatatctttgcaaaaataaaaacaatatgatttcaatcaagttttaaaaaaattcaaattctaaaattaaaatgaaataaacactgactcaatttatactgcattactaaatttataattatatataacaaaaaaactatctctaaaattgagatagtttctatttaaattattattatttacatttatacactttgttttaagcaagtttttaaatcttcgtcaggctcacttattgtttgtaagttaaatgtatcaactaaatattgcaatacattaggacttataaacgctggaagtgatggcccaaggaacattccttttatacctaatgaaagtaatgctaaaagatcagcaaccgctttttgttcataccacgaaagaactattgataatggtaatccatttacactggtatcaaatgcatctgcaagtgctgttgcaattctaactgctgaataagcatcattgcattggccaacatctaataatcttggaagtccagcaacttctccaaaatctaatttattaaatctatatttcccgcatgctaaggttaggataacacaatcttctggaaccttctttgcaaattcagtatagtaatttcttcctggcctagcgccatcacaccctccaattaagaagaaatgtctaatgcttccgtccttaactgcattaacaattgtttctgcatgacttaatgtagcgtggtgaccaaacccaacaagaatttcttttggttcttctgtttttgtaaacccaccaagttctaatgctttttctattattggtgtaaagtctttatgaccatctttgtcggcaggaatatatttaactccatcccatccaactacacttgttgtaaaaattctatctttatatgtttccctaggtctcatcaagcaatttgtagtcattaaaatacagcctggtataccatcaaattctttttgttgatcttgccaagcacccccataatttcctacaaggtgttcatattttttaagttcaggataaccatgactaggtatcatttcaccatgagtatatatgttaattcctttgccttcagtttgttctaataacatatctaagtctcttaaatcatgccctgaaacaatgataaatggtccctttttaatatttacattaactttatgaggacttggattcttataagtccctgtattagcttcatctaatttactcataacagcaacactcatatcaccggttctcatagtcattctaattaactcttcaacgcttaaattatcatttgttgtacattctaatcctctaaaatagaaattatcaacttgatcatcataataacctaaacaccttgcttgatgcccatatgcacttattccctttaagccataaactattgtttgtctaagtgatcttacatcagcatctaaatcttggtcaaacataattccagctctttttgcatctttaagcatttcttccttagtttcacttaagttataagttgcttgttctggatattctttatcagaactcactttatctcttaaactctcttttattttttgagattccttaagcatttctacatgaacttctgcatcaaaattaacatttgtaagtgtagtgaataacgaattttctacaaaactaactatacttttatctatttcctcgcctttttctataagatccatgacataacaacttatacctttgcattggtataaaagtaaatcttgaagattagctatttcaggtgtttttccgcacacacccattttggtgcatccttttccccctgctgtttgctcacactgatagcaaaacataagattttcatccatagaaatcactccttaaaattaatctatattattatttgtataaattaaattattattccttattggtcaaacgttgaaaatcattattaaactcattataatttttaatgatgatttagttagtcgcataatttaattatacattcaatgtgagctcttcgaaattcacattattttattgttgaaataaagagccgctataaaacaaactctgttagttttatagcgatcccttgcaagctcattgcttctctactattttagttcaaaactaatttatgccctataatcatattattctactttttcaaaatccgattttggtactccacataaagggcatacccaatcatcaggaatatcttcaaattttgttccaggattaacaccattatcagaatcccctaccgctggatcataaatataaccacatactgtacaaacataactatccataataaacctcctatctttttatgactttgtgtgcgtatatatcatttgcactttagtttactttaattcaccgtatgcaaactttgtatgataatctgataaaatataactttttaagtaaaacaaaaaaataacaaaggatatagttattttttccttatgggatttagctaatcttataaggtacttttttagtaaaatacgccttactgttacgcaaaaagatgccttagattaatatctgaaacatcttctttaaaatatttatttctttgtaattgcaactcgccatacctcaggaccttcttcgaggtattcccattcaaattgttctggaagttccattataaattgataatgtagtggacgtggatcatgatcatttataagctccattttttcaccagatcctaaactttcaaaagttttaaaaataacaggatgcttatctcttggttcatattttctagcatccacagttgcagcaaaatttgacatatttaattcctcctaaattctgttatttatttataaaatttattttacttaatttctgacttcattataacctcatttcttttaataaaatatgattgaaatcaaatatcaataaaaatttatttttatatataatcctttaatttcttttcatctaaaattataatgttcttagttcctactatctttattattttttcatcttcaaattttttaagttttctacttatagtttccggagttactccaatataattcgccatatctcctcttgagattggtaatttaatagatatactatcttcaatgttttctccataactggtcattaaatctgttattaaataagccattctagaatccacatccttggttgctagattctgtacaagatcttcaacctttgacaatctttctctcacagtttctaataattttattccaatctcaggctttctcatcattgcatccttcagctcatccttagtaagtgtgcataccttagcatctactattgctttagcgttaaatctatacgtagaaggctttattagatctaattctccaaaaaagtctccttctgaaagtatatgtaatatctgttctttaccatctttagtatacctatataattttatttttccttcattcacgaaataaagtgtatttgctatattaccttcactaaaaattatatcgcctttaatatattctttatgatttatcatatttacaatatctaataattcttcatcatttaagttttcaaacattggaaccttgcttgcacaaagatttcctctacaattattacaacagttaccgcaattattattcattccatcatcctccttgttttaatttactaagcgttgatactaaagcctaaaaataaatcctagctacaatttcgcagctaggattctatattgtagattataaatagggtgcatttttattgtgctcattcgctgatcatttttaatgagaactacttattttaagcttccataaacatcttcatatcgtcttctacattagtgattccaccaataccaaagttatctactaatactttagcaacatttggtgaaaggaatgctggaagtgttggtcctaagtgaatgtttttaactcctaagtgtaataatgataataatactattacagctttttgttcataccaagctatgttgtatgatataggtaattcatttacactctttaatccaaatacttcttgaagtttaagtgctataacaactaatgaatatgaatcattacattgtcctgcatctaatactcttggaattcctccaatatcacctaagtttaatttgttatatttatatttagcgcaacctgctgttaatataactgtatccattggtaacttttgtgcgaattctgcatagtaatctcttgatttagctctaccatcgcatcctgccattacaaagaatctctttatagcaccagatttaactgcatctacaaccttatctgctaaagctaaaacttggttatgagcaaaacctccaactatttgtcctttttctatttcagtaggtgctttacattttttagccattgctataacttttgagaagtcctttgttccatcagctttaggttcaatatgaggacatcctggcattcctgtagcacctgttgtaaataatcttttcttataagaatcctttggtataactatacagtttgtagtcataaggattggtccattgaatttttcaaattcttctttttgtttccaccatgcattaccatagtttcctgcaaaatgactatattttttaaattttggatagtattgcccagcaagcatttctccgtgagtataaacatctactccagtaccttctgtttgctcaagtaacatttctaagtctcttaagtcatgtcctgaaattaatattcctggattagttctaacaccaatgtctactgttgtaatttctggatgtccatagctttctgtgttggctttatcaagtaatgccataccatctacaccgaatttaccagcttctaatgctagtcctacataatcat

SEQ ID NO: 170 - DNA, 7458 bp, Clostridium beijerinckii
aacctaaagtccgtagcgaagctgtacgtatatttagaaaaataattaaaaattaagaaaagaaatagctaatagcatgaaaaactaactttcttatgttattaactatatctatgaataattcaggtctatatataaaaatacaaatttaaatccgatactttttaataaatcgtgtaattagttccaaaaaataccaagtcagtatgataaaattttcatactgacttgattatttaattaatatattttattaaacttgttctgcaatatagtaaagcaattgctcagtagcagcccaacctaagcaaggatcagtaattgatttgccataaatgtgttcatcaattttttgagatccttcttctatgtaactttcaatcataacacctttaactaatttttttaaatcattgttatatcctctgctgtagagtatttctttaactatgcggggttgttcagcaaatttcttcatagagttagcatgatttgcatcgacaattactgatggatatggaaagttgcattctccatatagttcagaaactctcattaaatcttcgtagtgataattaggaatattattaccatgcttattaactgaaccacgcataattgcatgagcataaggattaccagtagtatttacttcattatgcctatataaaaagttatgttttgcatgagctgcttgaattgagttaaacattactgataagtctccgcttgttggatttttcataccaacagggacatcaattccactggctgtaagtctatgctgttgattttcaacacttcttgctccaatagccacgtaagtaagtaaatcatcgcagtacatataattcgaaggataaagcatttcatctgctggagttaacccagattcttctatagcacgaataaacatctttctgattgaaatcaatccttcaagaatattaggtgatttttcaggatctggttgatgaaacattcctttatatccttcaccagtagttctaggcttatttgtataaattctaggaacaataaaaagcttatctttaactttttcatttacttttgcaagtctgttaacataatcgcaaacagaattttcatcatctgccgagcaaggtcctattataactacaaacttatcactattgcctgaaaatattttcttgatttcttcatctctttctgctttaatcctttttagattgtcagctagaggagtaatttcttttatttcctctggagatggtatttttcttacatttacaaaactcattgtaaagcccccttgtataaaattatatatatctaaaaatgaatgaaagaaatatgttgtatactataaatgatataacgttatattattttaaaagaagtatacatcatttgaaaaaaattcaaatttagtatatctatattactatataattgctgaaaaatctagtaacgtttagaatttatcaaaaatattttaagttttttataaatatgttaagaaaatttacaaaatagtaatcaaagtagattctgtctttgttcgatttacgaacagagacagaaaagataaatggaacatttttattatttacaatttaagtgctttttaggaatttatttcaaggaaactgcatatattttataggtaaaaatatttgagaggtatttatgtctatttattttgatttaaaaactattaatgaacttacaggaagcaattcttttaggcaacctaaagaacttacattagatgatttatcacaatatgatggaagaggaggaaaacctgcgtatgtagctatagaaggtgtcgtttatgatgtaagcaatgaatcaaattggagcggagggacacaccatggtcttaatgcaggtcaggatttaacagaccaatttaattcttgtcatggaatgatgcaaattcttaataatgcacctaaagttggtatattagtagatgataataacatgcgtgacatgaattttgatatcaatgaaaatatgaagaggcaagttaagcaaaatacatcgaattttagaccagatgattggattagatatattgagccaatagtgagttattctttgaatgatactagtcagggagctggattacaaggtgttggtgcacgacgctcatatcaaaaagctattttactaggagtgcttgttggcttaggtaaaactcctcaggaagcaattacacaagttcaacagtggcagaatacaggagcaaccactttattaggaggaccaagtaccggaggaacaacaagtggtggcatgggaaccggaggaacaacaggcggtggcatgggaaccggaggaacaacaggcggtggcatgggaaccggaggaacaacaggcggtggcacaggaactggagggtcaacaggcggtggcatgggaactggaggaacaacaagtggtggcatgggaaccggaggaacaacaagcggcggcatgggcgctggaggaacaacaggtggtggcatgggaatcggaggcaccactagagacgaatcaatagtaagaaatagacttttttttgattagattagatattaaaagcataaaggatgtgatattattcatatcctttttgagcagaaagataagtttgcctaatatattaatttacaatatagattttacttatcaataagattatttattaaatacaaaatgaaaagaagcattgattaaatattaatagtttggaattaagttacattacattaagatataaaataggaatatgtttaacttatgataatgttctaaattatgaaagattagaaatagaagttatcatactaatatacacggaatgttaaaattagaggtctgaatcatactaacattctttcgattttgtttattaattctaaaggtaaatcacctcttaaagatctttctagtaaattaggattttttatgtcatttgttaatagatatttttctattagcgctgctttttcttttgtgttaggatttaattgataaagtacataccaatcttctaaggacattaatgggatatcaattttattaatgtccgttaattctgagattgaatcagaatgaaaaatatatttgaatgtaccattgctgtgattaatctttaatccagctataatattaacctcagagccttctataatagatttatgaaaatattttggtgaatataatttactttctttgtttgctatttcattgctcatatctttaaacatttcatcaatttttctaatatcgtttacattaacgaaaatagatatatcatttaggttatttaaaagaccaaagtgacttagtaagactgatcccccagcgccccaaacgatatttaaatcattaaacttatttcctatataactcaaagctttaagcatttttttcacctcttgaatttatattaatatagattattgatgttaataatattattaatatttaaaaaaattttattcattagagcgcaaaatataaataatgacctatttaggggaataagtcattatttacacctttgttagcatttatataattattaattatggggagaaataataataattaaattactatctcaaatataatatatatcattattgtgtcaatagtatgtcaaatatgaaataatgtccaatttagaggcctgctaagcattaacttgaaagactttaaatatatggtatagtagtttatagaatatataaaattagtgagagtgagataaattatggagtggattgatgcagtaaaggaatacaatccttgtaacgagcaggaaatgaaggatagggaaattatattaaagtattctagaatatttgatgatattttaactagagataatgaaattatacatatgacaagttcggcatttgtgattaataaatctagaagcaaggttttaatggtttatcacaatatatataattcatgggcatggactggtggccacgctgatggagaaaaagatttgttgtttgttgcaattaaagaagcaggagaggagactggggtaaaaaaactaatacccgttaataatgaaatagcttcaatagacattttacctgtttttgggcatataaaaaaaggaaaatttgtttctccacatttacatgcttctctagcatatattattgaagctgatgaaactgaggaacttattgttaagccagatgaaaacagtgctgttaaatggatacctattgatgaaataaatatattttctaatgaactacacatgaagaaagtatatgataaaatagtttctaagataaagaatttatagttattgagatatggatggaaatgccctcagcgcataaaattgataagatataataccgatagatatttacataatattttattgtaatgaaaaaatagaattatgaatgggaatctgattataaactataaacttaattacagtaagtttgattatgtaaggagaaatagatatgagatatgtaatagtttctgtagtacacggtgaagcaggagattttaataataatttaagaaaagagctttttagaaaatttaaagcaaaatcatctaaacttcctgcacattttacaattaaggcaccttttgaatatgatgatgtaattacagatttaaataatgttctcgatgaatttatcaaagtggaaaaagcagagccatttacaattgatagatatgatcattttgatgatagggtaatttttatgaaggtaaatatgtctaaggaggcaaaagaagttcatgatagactaatagataaaatgagtgagataccttatgttacatttgatagaaaagatgaaaaaaataaaacttttcatgtgaccttggcatcaaagaatttaaaatctatttatgataaagtttgggattacattcatggatataattgtgagtttaagtgtagcttcgataatataactatttataaatgggaagaaggaacttggaaattatataaggaatttagattaagttaatttaacctaaattgagggatatagaaataaaaaactattttgttgtttaaatatttaaaaggatagatagacaacaaaatagttttttattttttaaaacaatatttatacggtcatatttttctttgagcgcatgtttaaaactaaaagtcttgaagatattaatgcagtaatagggatgataagaataatacctatgccacagcttaaaacttgaaatacttcagaacaaaaaactttttcgtttataatagtagagatagggtaattgagttcattaaaatatattattaatgtcataaatccgcttatgtatgcaaagagaagagtattagtcatggttcctaagatatctttaccaatattcattccagatttaaataagctatacttacttgacataggatcattcttataaatttcattcattgatgatgatattgatatagatacatctataattgcacccaataatccaattagaatttcacatattacaatttttgaaaagttcaattgaacatatagagataggaatgcaacagtttctgcctgctcattgctaaaaccttgtatttgagcattcatactcatattatatgttataaacataactaagaaaataactattataacagataataaagaagaaaatgtttttttattaaatccattaataaaaaataaactaaaaaaactaatgaaaattgcacaaataaaagtaactttaataggatcaatttttgcaccaattagaataagcataaagaaaaaagtaaagaaatttaagattaaagtaaaaaatgatttaattcctcttgtgcctccaacaattgtcataagaataaataaaataattaataatattagtattatattcatgatcttaagcttctccaatcttatgtttttttagaatagcaatagatgtaaaaattgttattggaatacttaaaactattccgatgcttccaataagcgctctcataaattctagagaaagatttatatttataatataagttataggtaacccgtttctaagcagaagtaatattattggcatactaccacttagataagcaaaaactaatgtatttgacattgttcccataatatcttgtccaatttctcgagcagatttaattatggacttactatcaatattaggatttttatcataaagctcatctatggcagaagatatagaaattgcaatatccattattccacctagtgtacctataataagttcaatgaaaaatatcttttctggaggatgagttagaaactccatttcttcaaagtgaattccactccaattatttaacttaatcacaataccagctattagcatggaggttaaagtacctgctaaagttccaattatggctgaagctgtttttttattttttcctgatactataaataaagaagcaattataaaaagtatacttcctattatagaaagtatagctaagtcataacctttggaaaatagaccaattattgaaaatacaattaaaatattaacaacaacacttactaaggatttaaaaccttttattcctccaacgagcaatatcagagctataaaaatgtttatcatataaataacatttttgtccctctttagatctagaatttttgcagaagttatttcattattatcgttactttgcagagatataaaaatttcatcatttacttttaaatctaagtcgttaacttgagaaaatgatgttgtattattaagttcaatggaatttcctttaaacgtaccattcataataatagcttcaattttttgatttttcataggttctatttttccagtagaattttcttctttggattcattttcggttattgatgttattttagctattggatttccatataaattttcattagtagaaataaaaaacaaactagctaaagatacaacaattaaaattaatataattaaaacagtctttttattaggttgtttacctatatttgcatctaatttaaataagtacttatttaataaattcttagtcatacacctgtagctcccttaaaatacataattataacaaattgtaaatttacattctaaaaaattatactcttataaagttgtgtaatcaatcatattatgatcaaaaaatataaagttactaattatttgattttacataataagataagtaattatggaatttttttattcttgtaacatttttgactaaattctgtgacaaaactgtaaaaattatcttatataatttaagaaaacataagttaatacaaaaataattggactatagaataacattagataattgcgaaactcattgataaaaatgaataatgattgatttgaagttgcaaaaacattattaatggatttaatggttcctgctatacaaatataatagttgacttcttaaaaaagggcgca

SEQ ID NO: 171 - DNA, 7037 bp, Clostridium beijerinckii
ggagggattattatgaacggtaaagctattaataaatctaattttaaattggtaacctatacaactaacaaaaatatttcccttaataaagtttcaaaaggtatatctaaaattctaaattatgcatttaaactatgtaagtctgttttaaattcacttttcagtaattcagaatatatttacaataaaaattcagcacattctaaaggtagtgaatataattatgatataacagatgctactgagcttagattaatagcatcaagaagaacatttttataattaacattattgtagtatgtacactgctttattatataaatttactttcactactataactattaaaaagagctacttaagtacttaaatgaaattgttatttcatttaaaaacctaagtagctcttttcttataaatatagatataaagtaattacttatttaataagctatgtattattcttgtcgcatccatgtatttagcaattgatcttccgtgatttaatctatttataattctagcacaaagctgtgacaaatcaacgcctataaaccatggttcattttgtaaactttcaggtatatatgttaagttagttgaatatattctagatattaatccatcttcatatgcctttgcaaacttttcaagaccttcagtaaagaaagcaaaagtagctgctacatatacatttctagcatttcttttctttaattcctttgcaatatcaagaacagattcaccagatgctatcatgtcatcaacaattaaaacatcttttcctgaaacttctcgtcctacatattcatgttgaacaatcggattttttccattaacaattgtagaatgatctcttctcttatagaataacccaacatctactcctaaaacacttgaatagtaaatagctctatccatagcaccagtatcaggacttattacaagtagactttccttatctaatcctaatgacttttcatttgacacaatagcttttacaatatcataagttggatatatattttcgaaagacaataaaggaattgcattttgaatgttaggatcgtgaacatcaaaagttataatttcatcaacacctaatctttcaagttcctgaagtgctaaggcacaatctagagattcccttcctttacgtctatgttgtctcgattcatataaaagaggcataattacagttattctcgctgctttacctcttattgctgcaacagttctttttatatcttgaaaatgttcatctggacctttatggttttcaatcccgaacattttgtatgtgcagctataatttccgacatcacataaaatgtagatatcctttgctctaacagtttcagaaatcttaatttttccttcgccattagaaaatctaatttcttcaactggtattaagaatgattcagtacaatttctgttgtcttggatatacttgttaatagcatcgcctaattctttgcaactttctaatgctataattccaagttcatgatttaattcactcatttgcgttccccttttttaattattttgtaaattggcttattattataaaaaaactcaaacaattaaagtatacctcaaaattggatatatataaatatattattacaattttcaagaaaattttatgataatcttaaagttaaccttttcaattccttataaaattccattttaatataatcattgagataaattttcaaattcgtatattactttagcgatgttattggtatttgtaaacaacatttcataaatgtgctatactattacaataatacggaattatttaatatggaatatcaataaataatttgagtttatattttttaacaaagatgcttttccccaataatttttccatcttttatagttaatatcctttgggtttcacttgctaaattattatcatgcgtaattagcactatagtctttccttgcttttcatgtattttatgaaataaattcatgactattcttcctgtttctgaatcaagcgctcctgttggttcatcagcaagtataatatctggatcatttgctaatgcacgagcaatagcaactctttgcttctgccctcctgacagctcactaggcaggtgagttaacctatcttccattccaactaactccaatagttcttttgctctattaattcttgttcttctatccattccataatatagcattggcagctctacattttggatagaatttgttctagctattaaattagaagtctgaaatacaaatccaattttcttattcctgatctctgctaatttattatcacttactttactaacatctatttcatcaagaacatactgacctgatgtttgtctatcaagtactcctataatattcattaatgtactctttccagatccagatgagccaacaatggctataaattcacctttttgtacattaatatcaatatccttaagtatatctaattgattttctttccctataaaaaaacttttagtaattttattcatttcgataatattattactcaatcagctacctccaatatttcatgaaaaattgaaataggacaaatttatctattaacattattactctatgttttcaatctcatattattgtcccttatcatattttgttactaattttaaatctttcttaggttgctaattttataatgtttattttgaaatgtgtttttacgaaataataggtaataacaaatttaagtaagcttaatactcaatttattattacctattacatcattaattattgatattattaaagtcttaataatatatcatttatttcttcacttacttttaatctctcatcataaacccattgaacgtctagttttaaattaaatattttagaaaatgagtaatacatgtttatcttctgataataaatttctaaatcatccaaaccaccattaaagttttggggtttaaataattctttctgtttattcacaaatagttcatctacataatttaaaaatgcattcataagttcatctctagacacatcaaatggaactttcagtaaatcccattgaatttcttcattaagcttgtatttccttagcctatccaagatcaaaatatattcacttacatccatcttagtataataatctaatttttctgttcttgtactccaaagggctaatttttcatttaaaggcagacttctaatcttaagtattgcttctgatggccctataacagcttgttttataacctcgtcttctgtttctaatttagatttaattatatctgcattgccgccaacactggcaatatacccaacgtcataaataccaagcctaccagcacgccctcctacttgctttatttcctgcgaagttaactctcttacttcttctccatcaaatttccttatactcataaatataattcttcgaataggaagattgactcccattcctattgcgtcagtagtcacaagaatctttgtttctttattaatgaactgttcgtattgcattttcctaacttcaggtggtaaatcaccataaattatacttgccttgatgtttctacttgaatattcctctgctatttctaatactctttttttagaaaagactacaacagcatcaccttcctgaacatcattataactaaaattcttatattcaacttctaatggtatagctcttgtatattctcttatttcatattcatctttacaatcacttataattgtttctaatatatatttagcattagcagctccacatatatgtatttcatcacattgaagccctagtagagctttactccatgccattccacgaaaaggatcacttatcatctgaatctcatcaattacagctatatcataatgttcttttaaattaactttctctattgtacatgatgtgtgagtagatcctacatttattatttcctcttcaccagttaaaagatcacaaattactccttctctatttaacttttcaaaattttctaaagctagaattctaagtggtgataaataaacacctttttttgcacttttaagacgttctaaagcattataagttttacctgtatttgtatcgcctaaatgtatgtagaactttcttttcatgcttcttgcttgacgatactcatctttaggattacttgggaaattttcttcaaattcttttgcaactaatttgggaatatgttgttttgttaatattgtcattagtccttgatttaaaaaactattataatttccacgcactacttcataaaaatcaaaacttgtattattatttttattatagtaatcaagcattttctttgaaacagtttctaatagctcttcatatctctcataaacctcattaaaatctcttaaactctgattttctaattccttaagatgtctaagtttctttcttattgaactctcatgctctaataatgctcctggctttgaatgctcaactatttcttctatttgatttatctgacccttatactttttaaattctctttgtgctgcattatttttcatttatcccactccatatactaatataatatttaactgcaaaaatatttcttattaataatataactatgattaaatatatttattcctttataagattacatgaaaattataccataactcatatcggtgataaaaattactttaatattattatgtaatatttcataagctagactcatatatttagttatcagtaaatttatttaatacttttattttaattaataagtataaggcggtgcgttcatggaattaatgtatgtaaaatatataaatggcgaaagacattctataataaagaacggagatgatattataatgagcaattcaaaaataataaaattcgattcagctaaaaagcaaaaatctaatgaacatactccttgtttaaaaaagaaaaataatcaagtccataataattctaatgataaaattaatgaagaaattaccgactttttctttaatgctattcacaagaactacctatctaatagagataaatagaatagctcgaacaagctatattagtaatttttatactattctaagcataataacttaaatctattatttatggtgatttctatatactctacaaacccttatgttccctataaattattaactttataagttttttttattgttaaaaatttaaattcttatattcctttattcttaaattcttaagttcttaaattctcgactttttaaaaagtttcatttaaatacatcttccattaaaaaagtattcattagtaagaacttatatattttctgcattttataaaataatataataatacctcaggctcttaatgtaattaaaaacctgagatattatatttaatttaataattcattttttataatctcatattttcacttgtaatttaatccaaaaaatttatttcaaattaaatattctcatttattgatttgcatatctctttagaatttctattataatttcagtgcaaatgtccatactctcaactgcaatatgttcaaattcaccgtggaaagcatggcctcctgttccaaggttaggacatggaagtcccatataacttaaagtagcaccatcagtacctcctctaataggttctattattggagcaacacctaaatctttcatagcatctgtagcgttatctattaaatgcatacaaggttttataagttcaaccatatttttatattgatcttttaatgtaaccctaactgttccttcaccatatttttcattcaataatttttctattaattgcattgttgattttctattttcaaacttttccttattatgatctctcaaaatatactttagtgatgcatgttcagtatttccattaaaactatctaaataataaaaaccttcatatccttctgtatgctcaggtctttcgcatgatggcagcatagaattaaattcaatagctacatttgttgcattaatcattgtattctttgcagaccctggatgaactgataccccatgaatattcacttctgctgctgcagcattgaaattctcatatgaaatttcaccttcctcgcctccatcaattgtgtatgcaaaatctgccccgaaattttttacatcaaataaatgcgctccaagtccaacttcttcatctggagtaaatccgacacatattttcccatgaggaatattttcatttattatagtttcacatgcagtaagtatttctgcaatacctgctttatcatcagctccaagcaatgatgttccatctgtagtaattatagtcttaccttttaagttttttaaatgtggaaactttttaggtgacaaaatgctattatttccttttaaaataatatcgccgccatcataattttctatgatttgtggttttacattttttccattagccgctggtgctgtatccatatgagctataagccctatacttgctttattttcatatccttttgttgcaggaataactccatatacataacaatgttcatcaactttacaatcttgaagtccaatttccttcatttcttcaactaatatattagctaaatcaaattgtcttttagttgttggatgtgtttctgaagattcatctgaggtagtatataccttaacgtattttaataaacgttcataagctttcatatctttgtctcctttttattttatatagctttccaataaagaatttcatatattggaaattaattatatatctattttactttttagaatgacataaatcaataattgatttaagaaagtactatactccctttatcccgataaagtattttattttatatcttgtgtatattaaacacaaaaaaatgaattccattgaaggggctgttgcaaaactaacatagttagttttgtagcggctcatttttttagatataaaaaatgtgaattccgaagaactcacattcattgtataatttacttatgctaaaaaccaaattacaca

SEQ ID NO: 172 - DNA, 6777 bp, Clostridium beijerinckii
ttatttaattaaaaaagtataaattgttggaacgccgtatgaggtgaaagtctcatgtacggtgtgaaccaggggaaaagatggagataacttcaaattcttacctattggtataaactttctcaggtataaaaacagatgcgacacctgaaaatgtttatgctgttgcagatgcaatcaaaggtgttatggaagctaatactagagattactttattaatgaatcttctagcttagcaaatgcttaggatcttattctaaaaaaagattggaggtaaattaaatggaatattctttatctatgacttttttaactgtagccggtgaaaaaagtactttaagtgtttctggagttaaacctactcttacaaaagatgaggttaacgcgcttatggacactgtaatttctaaaaatgttttcaagactgattctggtgatttagttaagaaatctggtgctcaagttactcaaagacaagttaccaaatttgaggtagcttagacttagtttttgaatataaaaatgggggtttgtcctaattacaaggataaatctccattttttttgcttctaatttttatatgaaagcttaagtaaattgataaaaatttacttaactaaagtatcctggatattgtctttcttatacccttgttgatgttttttttgtataaaatatcactatatccttttatgaataatataattgtgataatgctagataaaaggtctgttataggttgagcgaaccatagtccgtcttgaccaattacctttggtaagaaaaatatagttagtgctaatatcactgattgccttgatatacttaatattacggcagttttaggtttacctgttagcatcatgaagccagagccaaaggtaggaatggaaataagaaagataagcactgtatatttttttaagccatttatagaaatattcacaagttcagggttctgcgtaaaaagactaacagcgaatttgggaaatagctgcataattatagcactaactgccaagaatccagtactaaacaaaacagcaagggcaagagtcttcagggttctgccatagttcttttttgcataattataaccgataatgggctggaagccttgagctattccataaactggcatcaaaaataatattgtaatagagtttagtacagtcattgcgccaattgctagttctccaccatataaatttaaggaataattgcttacaatttgtgcaacacttacgaataattgattagaaaatggaactaacccaattaagaaaatagcttttacaattgaaatatgtaatttgaaattgatctttttaagtatcaaagtattttttaatttcataaaataataaagtccaagaattacggtagtaaattgagcaatgacagtagcaatagctgcaccttttattcccatgtgaaatacatatataaataaggcatcaagtaatatattaagaatgcaccctgtaattgtaatagcagctgaaaatataggatttccatcagaacgaacgataaaaggcagacaaaatcccagcatattaaatacggtaccagccatgatgattgtaataaaatctttagtataagataatacttcaccgtttataccgagccatcctaatattgaattttgaaatatcatatagagactagtaaccaaaagccctaaaacaatgcttagagatagtgcatttcctgcaaaattttcagcttcttctttattgccttctccgagttttatagagatattagagctggcccccattgatatgagagcagataaagctactactattgtagtaattggcattgtaaggccaattccagttaaggctagagttccgacttctgatatatttcctataaacatccgatcgattactatataaagtgaattaatcaataaactgagtactgttggaactgaatattgtataagtaattttccaataggtttttgttcaagttcttgtattttgtccattatgtaatttctcctttagatatattaaagatatataatatctgcaattcaaatataaaaacccatatattaatgggtaaatatttattctttgttggttttgcagtttgatttattttgagtcagatcatatagttttttatcttctagataattttctagtacattttcagcttctgacattactttttcaatcaagcatttgctattttcatttaaattgcaaacaaataatgagccagttccttcagtggccttaataacatccataaaagaaatagacctcatgtctttacgcaaaacgtaacctccatttgcacctggagttgactcaattaaatcagcttttaccagctgagttaaaattttcgaaagatatgtagtagataaattaaagtgttccgctagagcacttacgcttagcttttcacttttcgcattttccatcatatatacaattgtatgtagagcataatttgttgcttttgtatatttcaaattaaaacctcctaaaagatattgcagagtttatttatctataataataaatataatagattattttgtcaataagtattttattcacctggcaattcggattttgcagttaggcagtatacatctaattccggtattgaactcatttctacattttggatagcacacgttcaatctttcctttttcctgttactacccctatgtcgtgtttcacgacaccactgcaatgtcttaaaagtgcatctcttagatttttatccgatagctagcatccgtacctcccattctttaagtagaagataacgactgcacgctcctagataagttcaactggtttaatcatgccctaaagcctttctgcatccatcgcaaacaactgctccattaaattcaacaacatctttatcacttccacaaaaaatgcatcctttaatatattttttaacaaccaccccattatcaaccttaattatttccatggaatctccctcgtaaatttctagtacctttcttatttcttttggtattacaatccttccaagtgggtcgagctttcttactattcctgatgatttcatttaaacaacttcccttcataatttagctttgtttaattctgaaaaaattcgttttcatgagaattttcactctgtaattgtttattgtgaattgtgcactgtgcattgtaaatttatttaagtctataattattcctaatatccttctcaacttctacaacataatcttttgacatttcatatattcttgaagcaaccccttcatcaaatgtcagtaatctgtcaatagagaattcgctgctgactatgataggaagaaaattaagatatctgtaattaataatttcaaacataatatttgtatctgtttcattgatttttcccttaaagagatcatcaataagtagtacctcacataattgatactttgagatggtcctagtataatattcttcatcaatcatattttgttttatctttgtgattacatcacgataaggcatgtacagcactttaattctttgttttaaaaaattcaatgcaacagcaatactgcaatgcgttttaccgctgccaacctgtccacataataaaatactatttcgcctagtatcttttatttcatcaaaatcagtacaatatgctgctgcagtgtccttcatcctttgtgacgcattattccaaacttcaaaactagaaaaagtaagtttactttgttcaacattgattccagaatacttccactcattctttagtttttctatttttctgcattcacaggctacagcaagaggctgcatatgttcctgggggataagtatccatccagtatcgcagcatttatcgcatttatatgaggtttgcttcaatcctctttcgttcagcttctgtaagttttcgcggttccttcggcttgaatcctgcaaattcatttttatctgctctgttactctttccattgcttctaaccccatttttctttacctccatatgatcttctggatacccatctctcctccagttttttaataccccaattgcatactttatgtcaggacaattcttctcaaacccaacatccatggccatcttaaccattttttctccatggatatcaatagccgatctaagagcaacatagtcgcatcctcctggctttcctgttattttttcatgataatgcataagctctaaagctttaagatttatgtcctcctcttcccctgattcacttttagtattattgtgtttcttagatagattcgactggctaacttcatcatcacaagctgagcctttattatttatatcaaaaccattattctttttaccctctatgtttttatctttatctatctcttttttctccttcttattcttattctttttctccttcttattctgttgcgttactgtaacgttacatttattttgagtaacgttactattatttttagtaacaatacaattattatcatcagtttctaaaatgttattactgatatcttcattattatcaataatttctacagtaatattattacctgcttcgctagtagtaatattagttttatcattaatatacgtatttccagaagcctcttcactagtttccaaattttctaatatatcattcttacctagagctttgttttcttctatagtagaattcttagagtaatctttctttccttctaattcattagttttttctaattctacactttcatccagatcttgattttcttctaaatctataaattcttctaagactttatcttcctgagtttcttccttattacttttagctgcattcttctcttctttcttcttttctctatgattttcaactctttttctgttttgttcacggaccctttccattccctctatgttctgatgcttatcccagttcacaattctaattactttatcagaagctatttcaatcatgccaaagttagataatacttttaatgcaatcttaatatcctctaaaggcctagaaaataatacagccaacattttggcagtgagaggtttcccttctgataagaaaacctttccattagcattaagttttccaccaagtaaaagtattcttatccaaacataatgaattgtatccctgttaggcattgcatctattaacttcatcttttcatcatcatgcatattagtagctaatttaatccatttgatatctgccattattttcacgctcccataaataaaattgcctaaacctttcaagaccattccatgatgggtttaactcaattaacttacaaacatctatataacatttaaaaatcctaaaattcatttgtaagtcctcactttctttttatacatttctatcaaaaattgtatccctgatatattctagctcaatgtgtatgaaaataaatttacatttattttttaatttaagactactattttcttaattcaattaaaatttcttttaataattcttgcatagcttgtccttctataaaaataaccatcagctcaacataatgctcttaaattacaatatatacgttgcaattcccaatgcacatttcacaattacgtataaaattcttgcagcatttttagaattgtgatgaagaattatttttgcaatatatataatcaattctagatttctaatactatatatataaagtcaatacattttactctttaagtaatttatttattaaaaaaaatctctattggattatttatatctaatagttttatcatcttatcgatttcattagaaccaaatattcctttattaagtttattacctaaggtttttggagacattcctaattcccttgccagcttttcctgagtatatccttttgcttttatctttccctttaactcattaactaatatcataaatgctctcctttcgttactcgttaagtaatattttatatattatggctattattgtcaatacttcttacgtaactttttctatatactggaaaataattgttgcatatccggaaacagatgttataataaattatattaatagtctccaaattagaatgatttttttaatttgcctaactgcagtaaacaaaataaataaaaagttattaagttttattaggacgcttcgattttattatagattatcaataaattatattaattgataatctataatttacttacttttaatatagaactaagaggtgatataaaatgggtttgaaagaaaatatcaaaaatagacgattagaattgaatctcacattagaagatgtttctaaaagattatctattagtaagccaacacttcaaagatatgaaagcggtgtaatctctaatataccttctgacaaaatcgaaaaacttgcagtaatattagaaacaactccatctattttaatgggatgggatgaaaacaaaataaaaacacgtttacaactatcagaagaattagaatgtttattaaaaaaatataattctttagataatctaggtaaacatacagtaaacacggtattagaaatggaatttaatcgttgctcacaacttaataatcaagatagaatcttttaatttattgtctataataggcacgttatttgataaaaataaattaaaattaaatatccaaattaaattacaacacttctaattaattgcaccaatagctatatcactcatatacaaccttttaattattaattttcatatataattaataatgctgtataattcactctagaataatac

SEQ ID NO: 173 - DNA, 6737 bp, Clostridium beijerinckii
aattataagtattattctaatttctcaaattttcattaaatatatgtctaaacttttcactattatatttaatttcattaatctgttttatagacattgcccccattatactatttgttataattacctcttctgaatgtgttaaatcatctatagtaatgcttttttcagtcaccttaaattttttcataatcttatctcttattataccttttaataatccatcttcactatttggagtaaaaatttcattattttttatcataaatatatttgcacagctcgtttctgtaacattacctttttcatttaaaaatatcacatcatcgtagcctaatttcttagcattctctttttcaattatgttttctatatagcatgtagatttgatagaggccaatcttgaagtactgttacgtcttacctttgaaattgttaacgacattccttttttataatcgtcatttttatatgcaatttctctttcggttattataatgtttaaaggtgtaacagttatttttaatactttgtcttttatctccaacttatttaaatgatctcttaaaaatttttcttccactaatggctgtaaatttaattccatcatatctttttttaatctctgtaaatgctcttctaaatatattggtttttccttacaaagaattgtttcaaatattcctcttccaaaaaataatccatcgtcaagcattactttatcataattatgaactatccttctcactataatacctccatcaacgctttagctttgtctattgtctctaaccactcctcttcttcaatagattcccatgttattcctccaccaactcctaaatacgctttattaccttttcttataatagttctaataactatattaaaatcactatttcctcttaaatcgaagtatcctatagaccctgtatatatatttctttttagcttctcaagctcctctattatttccattgcgcgtattttaggcgctcctgtaattgatccacccggaaaacactcccttatgcactttactgaagacacattttctcttaatcttccttctattgttgccacaagatgaaatacagtctcatactcctctaacttaaaaagttctgtaacttttactgatttaggtttacaaactttactcagatcatttctttctaaatcaacaatcattaaaagctcggatttatctttttccgaagccattaactcatttctatttctctcatcttcctcataatcttttcctctaggtctagttcctttaatcggccttgtttgaaccttaccatctaaaattgataaaaatctttcaggtgaagaacttattatttgaaaatccttaaaattcatatatgctgaaaatggtgctttatttgtatttctcaattttctatatatttcatatggcttttcattattattacaccatatccttctagtcatattagctatatatacatctccacttcttatatattctttaagagatgctatagcttttttatactcttccttatcgaaatttgaaaagaattcattatttgttttttctaaatttactggaagcccctcaatataattctctagacacttttctatattaagtatactatttttagcttcttcaagttgtccaactgaagttatataagtttttttattttgtaaatcaaatattattagattgtcaaagaaaataaaaatgctatctggtatactaaaatcttcctttgattcatctggaagatcctctaacactcttcctatatcataagaaaagtaaccaatagcaccactaacaaaaggaagtttgctattaatactaattttataattctcaataattttatccaatttttcaaatggatctacatcattatattcttcattatcaatagttacttttctccccttagagataaattttttatatggattcaatccaataaaagaatacttggataacaatttgtcttctttcgaactatctaaaaatatagaatcttcactatctttaaaaagatcatatgtataaaaaggattataatatgtatttaactctttaatcttaaaatctaccatttctaaacctcttgcactctaaaataaaattttctaagattttatgcccttcttccgtaagttctgcttctggatggaattgaactccatatataggtaattcattatgtctaattcccatgattaccccatctgacgtttctgccgtaaccaataattcttttgggagtttcttcttatcaataattagagaatgatatcttgttacctttaatggatttttaacattatggaatattccgctattattatgtgttacttcacttattttaccatgcataggcctgtcgcctttaattatttctccgccaaaataatgtcctatacactgatgtccaagacatatgcccaatataggagtttcatttttaaatttatcaataatatctaggcacaagcctgcttgcttgggatttttaggtcctggtgaaataactataccataatatttattgtttctgatgctctcaatattaattttatcatttctaactacatccacaatttctccaatctcttcaaaatatctgaccagattatatacaaacgaatcataattatctatcattagtaacactttaatcattcctttttaactttaattattataactgtatatgttattattaagtttctgcatttctatcttaattgaactcttgttcttgagctactataattttaaatataaatttattatctcaacatatatactattagtcacatatttattttagcattaaataaaactctgttccattggttgtattttctcgttcgtaatttaaaataatatctagtcagtcttactcttcacaataaattacattaagtatcttgtattgctacataagaattacttatatgtataataaataatatataaattttatttattgtacatatattctcttgtcataggaatatcatcatttattcctttagaaattagtaattgatgaatatctatcactccattattaaatattgccgcacatgaacaaagataaagttcccacattcttataaattcttcatcaaacattttagaaacttcacttagattgttattaaaattctctctccaatatagtaaagtcttaacataatgccttctaagattttcaacatcgatagtatggaaattataattactacaaatgtctataatttctctaaaacttggaataaccgcttctttaagaatatactttttaatccatggatctacagaatattcttttaatgaattgatataatccaataaacataacccttttggttttaagacagaatcaatattttttataaatagttcataattctctcttcctatatgctcaaccatgccaacacttacaattctatcaaatgataatccactttcagctaaatttcggtaatccataagtctaacttctagtaatttttcaagctttctttcttttattctttcattaaattttttatattgctctttgcttaatgtaattccaataccatgaatactatatttttctgctgcttcaataagtaaaaatccccacccacatcctacatccaagacgctcatgccttcttttatgtctaactttgctagtatatgattaattttattaatttgtgcgtcatgcaaactatcattatttgatttaaaatatccacatgaatatgtcatagtatcatcgagccataaactatagaaattattccctatatcatagtgctcttgaatctcacctttttgtttttttgaagaattggattgaaaaatcgtattttttactggcttactacctgatgagattttatcaatctgactaataaatatatttataacttcaaataaatctccttttatctctatattccctttcatgtaagcttcaccaatagcaaggaacgtacttctaattaagtctgttttacttatttctcccttaatatttatttcgaattgaggcgtacccttccctataataaattctttattattttgaaacttaatcctatatggtatatcatcaaattttgacaaatatttaacataaagactatttattagattcatatagaattcctttctataatttaaatactgattaatttatactattatataatttcaaatatgctatacattaaattctatattcaatataaataattaaagagacagtcgagaacgcacaataattttacgcttctctaactatctcttaactaacttctcaagtcatttcattttgtataattatctttttcctcattttatttgctaatttttttgttactttctttagtgcatttttacaatcacaacttttaaataatttccctcaggaaatttatctgtaactgcaaaatcttctgaaagagtatgttcttctagaatttcataatttctatgtgattctttaaaagcttcatctataaatttcttaaatttgcccatattaaaagtagcacagtttgttgaagctacaattactccttcatcctctgttatatctatagctgatttaaccaatcctttatagtcttttgctgcactgaatctattatcttttgatgttgcaaagcttggcggatcaagaataaccacatcaaattttaattcttccttttttgcacgtttaaaatataggaaaatgtcttcaacaattatttcatgttttgtgaaatcaatattatttatagtaaagttctcagttgttttttctagacttcggcttgctaaatcaacacttgtagtaatagcaccaccttttgcagctgccattgaaaatgctcctgtatatgaaaaagtatttaaaacttttttattattggagtatttatctttgatagactttcttacttccttttggtctaaaaatactccaaccatagccccatcatttaaataaattgagaaattaactttattttctttaactataagaggttcaggtgcttttcttccacaaacatagctatcttcatctacaaccataccattttcttcaaatctctttttttcatatataccatcaaaagaaactaaactttttatagctttaattatattgtctttaaatgtatatatacctctgctataccaagtgatgagataatattcatcgaaatagtcaatcgtaagcccacctattccatcgccttcaccattaaatactctaaatgcagacgtgtcttttgaatgataaaatttcattcttttggaaaatgcattcctaatcttatcatagaaaaatttataatccaaattgctatttttactgttacttaaaatccatccacagcctttattttgtttcccataatacccctttcctaagaaagtctttttttcatctataagggttatgatttgtccttcctcttttaaatcttttatattatcaaaagcttcttcaagaattaaaggatatccatttttatatttcttaacaaattctttttttactgtaagtattgcttctttcatatatgtatttaccttcccgaaaactattgtattaaattctaaataattataccataaatctaaactagttaattactaatttaaaattgcatattttatcgtgtacactatatattattgtttctttgctccagattagatactgattaatttataccatatataattttaaatatgctatagattaaatgctatatacaatagaaataattaaagagatagtcgtgaacccgcaataattgtacgatccaactatctcttaaataacttctctattcatttcatttttgtctaatattttatacatcaaattacatataatatacttgtttaatctataaactattgaattaaaattctactatagtctcttatagtttcgtttaatttaggtaatataatttgcaattctccattttggaattttgcagaaattcttgatttatcaacgttctcaacatgaaaagtccttgatatttttccataagctctttctcttctaatataattatctttttcttcatttatttcttcatttctaagagcagaaataattaaagtattgtctctgtattcaaggtttatatcttctttcttaacacctggtaattctgcactaactaaatattcattttgagtttctcttatatcagcattaaatttttggttatttccaaaacccaaactcattggtgaaaagaaatcatcattgaaaaatccattgaaaaaatcttcaattgagcctcccttcttgtctaatccgttagttctaaaaggtatcaatccaaacatactaagacctccttaagatatttattatttgtttttacaagtaaattatagctaaaaggtcaaagaaggtcaaaatcagtttttgtcctttattttttttctcttactatatatttctataatattaaattatcttttacttacatagtatttgcttttattttctctaattttttattgcttatatatttttcatgatctctattctttcactttgatttcaaatcatatttaacgtgagttcgaaaagctagaatattttatgggtaaatatggttatgaaaaaaagcaaaaaagtatccttgtaatcttgtggctcgatattccaattattccatagttagatatttgtcca

SEQ ID NO: 174 - DNA, 6495 bp, Clostridium beijerinckii
atatgtaattatagctatagaaatatactcctcgaagcttatttgtattttagtattcaaatatgaaaaacatattattaacttatatgaacactggatattcctcactgcgaaattagtttatttatataatccaaatctaaagtattttcaataatatacttaatctttttctcatgataattatcctaaataagtaaagaaatacttaaagttcttattactttaagtatttcttttacttattatcttatatttattgtaatggctttatcataattgctaatagtaggaaattttctaggatatgctgtatcagggttattaaaagaagttcttgggattatcgttacacttctcatatcagttgtgtcaacaaaataatttaacattatacttttatcagatccatgaccatctgattccttaatcttatttcctttatcatccgtaagttcccatgatgccatatctgtagtatcactaaaactatcgatatcactgcctcctgtaaattcaattcggtatgggaatatttttatattgtgcacatatagttcatggccatctattactagagtctgattaatatccttggctaaaatcggcttgtctatttgagatgcgccaattgcaaaattgaatttccaattccctgttacatacgagtcaatattggatgtactagttacccctatcctatcataatctattgaaatatttaaattttgacttgtatctatattgtctaagtaaatatgtgtcactatatcacaagttccatcatcgttatggatataatcgtacttaaatttatttgtttcattatttattatctttctattaatagatatacttggtttcaactcttgtgcataatcacctctttctttactatccaaatgtgttgtaaaagtaagcatatgagtatctgcataacaatcagatagagtaaccttaattcccttatcttcaacagtttttccaatcactattttagatttttcaggtattgaataattttctttttctgaaacagaatttccgctagcatcttgaattgcagatgtattattaactactgcagcactagaatattggcaattacctgcagtaattactgaaataagtgcaattgctccaataagtaaacttttagattttttatttcgaaaacctacttttatttttttcattatcttattcctcccacataacttttcatttttttgatatcactgcaagtccacttttaataataattaaaaatgatcttctgttatcattcgttttttattgacagcctcctttcttgttgtaaataatattaaattatacgcctaatttctatttcatacaaataattacatatattgaaatagcttgttggtagatttgagagaaaaacactatctcttatctcttgattcctcatctcttttacatttataaatccaaattctttgatataggatgctagcatttaatatcaagtattagcgtatatatgcactaaactcctaaaatatttatctatatttttttgactttccttttaagaatcagtatgaaaacttttgttcatttttttgtttaatttcttattattttttgcttatcaaaataaaatagtacaactacagtacaattttaagctctatttctttttcgcctaacatgatttttatttcctctacttaatttaatatttactttgagtatttttattttagttcctctagttgttcctttttatataatttcatcatcgttagtacctcttcaaaatagaaaaaggaatactcaaagttcctattactctaagtattccttttataccaaattgtaatatatatttgattatattttttaattcactaatatatactaacttacactccaagaaatttttcttctgtcgaaagccttaatacaacttcttcctctttctattccaagtttctcaattccatcattcagaattagaaatatgtactggccctcaaagttacgtgtctccttaacgatattacttaactccattaaatcaatattttctaatttatcatgaattttaaaaattggcatatgatataccttatttataattaacttaacatgaactaaataaaaacaagtgatcattgctttctttattccagttccaggctttccattaattccaattatcttaacaggaatttcatcatcattatattttaaatacagtggcaaatggctatcctactactacataagttaattcttcaaaataatcatctaaattttctttaatagcttccgtatccttaaattaaaatatctcgctatatgctttctaacaagcacggttccacctgtataaatgtaagtttcataaactccaccttctgattaacttaaaaatatcctagaaatcacttggtctaggtgcagaaggtccaagaccaatagaacaaagccaattcagtactacctcatgcagcacatttatgttgtctacctggcagtgctctaatccgccaagtcttctatcctctatggcgaagaacgtcttgtttttcgaaccagcctgctcgtaatttttaagagcttgtgttagcggattgggctgaaccaatatctcttccgcaccgtgcatcacaagaagtgggcattctatctggtgaagcacgccctcaagattgtaggcaaaacgaggatttcctgcaaagtcatccaagctttttgcgcccaaaattctcatgccgtgagcagctaaacttggtggcatccattttagcattgcctcccagtcaaacgcgtgagttcctccgtcagagatgacggcagcaatcctgttgtcgaatgcagcaaatctaagggagtcatatgccgcaaaactctcaccatgaacaataatcttgttaggatccacttcaggtctagttagaagaaagtcaattgctcttgaatgaaaagcctcgctgtcagctcttctgccctttcctttttcgtacattgaaagaccagttccaggctgatcatagaccataaagttatatccacacgaaataaaggcaggtcctaaccagaaatagttctcaattgaccactcatcaccaccattgagggccaaaattgtgggcttcggaccttttatccaatgaggtgagaaaaagtacccatccaacttgacatcttcataatctacttggattttctctggttttacatcaaagtactttccagcagcttcaaagagttcatttactttcctaaatatacgaagtttctcggcatcattatccatcacagcatattcagcgattcggtggtaattgcaagcacgaatgtaacagttacgtgctgtataccagtttccaaccgcttctgcctccttaccatgcctttccaaagcatctgctgttatgagccattccctatgccatgtttccttatcatttggatctatttttttgcatgcttcataaatctcggtgacgtcagcagcaccaagacttgccaagcctagagctttagttacttgatatgacatcatatagttgtttggccaacggctaaattcaattgacattgcagtatcctccttctctagttatatttattacttccatccttctctgattaagcataagagtacatgtttcgaaatagcggcacctatctatgtccgtgccacgaacttgattctctaccatatcatttcctcctatcaatttacttgtagtttttaagctacaagtaaattttacgatataaaaataaagctgccctaaaaggaaaataaatctttataaagagaatgtaaaaaattataaagtattaggaagcaaaaaagccactgccggtgttctctacgttcaaccaacagtgacctttaatttattttagagaaataaaattagcattgtacaagtggaaggctgaactttatacccaggccaccatattcagaagaatatgcatagatttctccaccatgatattcaataattgatttacagcttgctagtccaagtcctatcccaccattttcaatttgcctggatttatccacagtgaaaaatttaaaaaatagtgaagatatatccttatccggtactccaatcccattatcctcaatttcaaaataggcataagccccttgtgagtatccagtcatatacactttcaactcattttttcctccatatcttacaacattactgaatagattaccaaagactcgacctatcataatctcattgaccataagcatcatattttccttaaataaatgtttgtaaataagctcatagtcaaatcctgatagctcatgttcatattctagggcaatgttctcaaataattttgatgcattaacgggtttcacggtcatggattctaaattcagtttctctttgatgaagcttacaaagtcgttgataagttcagccatatattttgactttttttgaatcaactcataatattcctgcttttcattttctggtagacccttttgcatggctaacagttcagcaaaaccattaatagatgttaatggtgcttttagatcatgagcaatggcagcaatcatatccatttgctctttgtgtgctagttggagcctcttttccatattattaaaatgattataaaggtctccaatttcatcattactccttagcgcaagtggcggcaatggatgcacaatatttattctttctagtctggaattaagtaatcttattggttcttctatacaaaaatggatatacataattaaaataataaagatgaaacaggcaatagcgaatatgggaaggagtaatactatatatgatggatccagtaatgaactagatataggtgaatattctgcaaagataaacttcaaatagattccaattgaagccataaaaactataaacataaccagaaatagtaaaggaagctttattttcagtttcatattatcactctctttccttgtacttatatccaattccccaaattgttttaataaaatcatattcaggaccaagtttcttacggatattttttatatgaaccgttacagtatttaattctccgtattcgtctccccagacatattcatatatccgctcacgagtcaatacattattggggttatgcatgagcatggacaatatttgaaattcctttgttgataagttaagctttttgttatttagaaatgcttcaaaagtcttatcattcaaaatgagaggagaatcaatcttttctccatttggactaagttcattccactctttaaacagcctgtcgactttcctgaagttggcccttatcctggaattaagctcctgaatactaaagggctttgtcatataatcatctgcccctatttcgagcccaacgattttatcaatatccttatcccgggcgcttaaaaacagaattggagcattataagattttctgatgcttctgcagacatcaaggccatccatatcaggcatcattatgtcaagaatgatgaaatcaatattattttctttcaatacacataaggcttctttcccagaatatgccgaaatagtttcaaatccttcatagcttaaactctttgttataagttttactatatctttatcgtcatctataactaatatctttttttgcacttttgcacctccgatctgcttcaataaacgttctcttctacaggctttccacacaatactatctcatttatgattatcaaggatgataaatttaatgccttttcagaagtagtatttaacgaaagtgaaatcttattatgattatctgctcttgttataattgttccaattcatttgcgaatgtcatttttctcatttgaatcagcataattccaccataatatattgacataaacaccaataaatacaatgactgatacagttaatgagccgaggatcacttatatatatttcagggattttcaaataaagtaccatagtaccctatataaaaaaagtatagcactcttttttttaatattcaattagatacttattttatttcatggtgccaaaaaagtaataaattcttaagtaaaaaatatatagaatcatagaaatatgttataacaaactaattcttaaaataattcatcattattcccccatatctgtatatatttttattaatcatattacacttaagtacttttatatggcgtttatatagatatccaatcataatttatttgatatgtcttaaatttatagtgtaatattcttttttatactgttcatatggtatttatactactattaccctatggctttaatagaacaagaatactaaaaaaataattgtattgcttgtatatgcaatatatacaaaacttcaatcgagtaggaggaaaacaattattttgttttccgacctctcacaccaccgtacgtaccgttcggtatacggcggttcatcagaatttaatgcatcatttgatatgtttgtgttagactaataaat

SEQ ID NO: 175 - DNA, 6405 bp, Clostridium beijerinckii
taagaaaattgcttaaaaaaagtcttaaggtcgaagtctatatatctattaacttatttttgaaaaatatcaaaaataagttaataatttaaagtaaaaatttggttaatcaacacttgtgataaattactagaaaataaaaaataggcctataaaaataaaagcctattatcttaaaacatcactttctatataatttagattctttcttagttcagatgctatattccaagttatatctccatcttcaaataaagattgtatagtatttctttctaattgcattgctttaatttcaatttttttcttttcatacttgctagctttttctaagattggtttgcttgcaacccaatagacaccttgataatataaaattactttctttaatgtttcttcattttcaggagtaacaatagatttaacatattgaattaagtattttgcattagtagaataaagttctttcatggccaagtcttttaattcttgctcatttcgtttttgattttcaattcctcttaatagatatctaaatttttttatattaaaaattaaggaagtaatgcgtgctaaagcttctttgaatatcaaggaaaagctttcaactgaggacattaacttgattttatttctaactgatttttcataaaaatatgcagttgattcatctatcttattttcttgtaacatcttttttgtattttcaatttcttttttaaaacatataagcatccatttcttttcctctttgctgcttctgttccagtttttataataagaatttccacgttttaattgatgaatacgatatttatactcgcttataatcatattaatgtactttttattatcaatttctaattttaatttatttatagtgttagcccaaacttttatctgcgctttattcagtatctctaaataattggtttctttagagatacttttattagcaaatatcggtaatatgaaagttgtaataagaagtgtagttagaattaccccaacggacaaaaataaaattaatgttctctcaggaaaagggtccccattttctaatgttaaaggaatcgaaagaactgtggctaatgtgacagctcctcttactcctgataaagaagtaaggagcgcagcgtgaaacttaacatttttttcctctgtcttgcaggagctatctccaaacttatacataaatagaacccataaatatctaagtgtaaataaggctagtgtgattaataaaacatcaataatagcttgaaaattatttattgtggcttcataaaaagcgattttaattatatttggtagctgtaatccaactattataaatataagaccatttagaacgtaggctaaaactgaccaagtattttctgagactgcatttagcttagcatttttaaattttaaccttttagatgatagtgagtataccattccagctacaaccacagctaatatacctgagactttaaatacttcctctgatacaagatatattataaatggtgttagaatttgaagtagtatttcaactgtaatatcctccattccaagacttcttatccaaaattcaaatttaattagaatattctctaaaacgaatcctgcaattattccccctatagatactatgaaaaaactcatagttgcatcgaataatgagaatgttccagttagtgctgcagctaatgcaaatttaaaagatacaaggcctgatgcgtcattcataagtccttcgccttcgataagatgaagcactttccttggaagtgagattttttttgaaagtacgctaaccgcaacataatcagttggagataaagcagctgcaagtgcaaaagctgaaggcaacgaaatagatggaattaacttatttataatgaatccaactaatattactgttgcgataactaaagctagtgccattaaaagtatatttctcctctgtttccatagagatcttttatctgcattttttccatcacggaaaagaaggggagcaataaacattactaaaaatgtatgaggatctagctcaatgctaaattctgagtgtattattgcgattagtgatccaattgcaatttgtacaataggaactgataaggaaggtataaatctacttattatagttgatagtaaaatgcaaattaataatattaagatataagtaaacatatataatcctccttatttaatatttatgtaaaagcatataattaatgctttatgtgaaatttgatagactaacagaaaatacactaattatagtatattaaattgctgagagtttatgtaagagatttatttctcggatttaatgcttgaatctcatattatataggttttaaacgatatagtccattcttttataaaattatttgttttgtattgcctaatagttttaagagaaactttaataaattaaacttttttaatatatattgcaaaaataattcttcattataactctaaaaatattgcaagagttttagccctaattgtgaattacaacatatatatattaaaaaacacttggtaatttacagcaaaccttttatcgacaagtcagtattgtcgaatataacaattttcgataaaaataataagtattgacagtaaaagacatcacatatataatggtaatgtgattaaatcatggtaaaagttaatataattaaagttataataaagtcttgttttatgaaatgagacttttttgtttttatgatacaagaattctactttacaataaaattttgcaaaataattacttataaatatttaatatacttacgataaaggggaaataataatgaagttaaagaaaattaaactaaaaagtattagaaccaagcttgttatgagtttattaggaatatgcttaattcctttgataattcttggatttggtgccaatgaacaagctaaatccatccttaatcaaaaattgaaacttacaagtcaacaaactcttttagaattaaatgatggaattgataactatttcagtgggtttgtaagcatgactaaagcattatcaactaattataattttgttaattctgataaagatgaatcatacttagctataactagtatgttaaaagatgtcaaggaaagtgataacgatatctttagtacatattttgcaagtgtagatgataaatttgaaatatatcctagtgagaaaatgccagatggatataaggctagtgatagggattggtataaacaagcaatagaacataaagaccaagttataataactttaccattcaaaagtgcccagactggaaaaaatgttgtatctatagctaaggcagtagaaaaggatggaaaattagttggggtatgtgcaatgaacgtatctttagatgcaattacagaaaagatatcaactaagaaaatagggaatactggatatatatttgtttcagatatagatggtcaaaatatgatagcgcataagaataaagatttaattggtacagatgtagcgtctaagcagccattttggcaagatgtaaaaaataataatgcaggatttttgacatatgaatttaataatacaaagaaatttggagtatatgggacaaaccctactactggatggaaggtcgtagctactcttgatgagaaggaagtaactaatgataccaattcaatacttgcgacaacagtatacatatctttagttatattaataatttgtataatgctatcattattcttaagtaaaggtatagcacaaaatattaaaaagctaaaagaagtatttgaaaaagcttcaaagggagatttaactgcatcgataaatttatctacaaaggatgaatttatggagctttcacaatcctttaatgatatgatatctaatatatcaaagcttatagaaaatgttacagcatcatctaaaatagtattagagacatcgtcaaacctagcaaatatgtcggaagaggtaacggcatcaatagaggaagtctcaaaatcaatagaagacgtttcacatggtgcggttaatcagtcacaaaatgcccagcatggggttttagaaatgaatgagctatcaggtaaattggatgaaattaatgaaaattcacatgaaatggacaaactttctgcaaatacgaaggaattaggagcaaaaggattatctatgattgatactttgatagaaaaatcagataagactaaaactgctacggatgaagttaatggtatagttcaagaaatggctgaaaatactaaaacaatagatactatatctgaaaaaatatctcaaataacagaacagacaaacctcttatcattaaatgcaagcatagagtcagctcgtgcgggtgaagcgggaaaaggatttgctgttgtagctgaggaaataagaaaacttgcagaacaatctaaagtatctactgaagaaataaaggagattattgtaaatataagaaataagtcagataaagcaacgggggctattatagctgctgaaaatatagcaaaagaacaggagttagcagtaagtaagacactggagatatttaacgagataatagaatcaattggagtaatgagtgctaaagttaatgaagtaaaagcatctgcaattgatataaatagaagtaaacaaagtgtaatagtggaaatcgaaaatatttcatcaatatcacaagaaactgcagctgcatcagaggaagttagcgcatcaacagaagagatagatgctgctatggttagattcactaagcatgctgaggaacttcaatcactttcggaaatgttaggagaagaattagctagatttaagataaattaataataagaattacaaatttaggtttctaaatatctgtagatagatatttcagatactaaactatcaatgaattcaacataataaaaatgctttttacgtggcgattaagctatgtaaaaagcattttttagctttagcttatacaagttaaagtgttattgtattagataaataggatcaaaatattatttggatttaaacccttgcttatttctagttgtgagatattatctaacttataattaattcatctatataacaatatttataatatttatgtatccaataaaataatagagtgttactattaaatatatgttgaagtttacaatgaacatttcacaattcacgattatggctaaaattctagcaatatttttagaattattgatgaagaagtatttttgcaacataataatatacaatacttaagaataggaatggagtgggataaatgaaaaatactatagtggtgaaagcaatgagagagtctgatatagatcaagtaattaaactgtggagagatatttttggctcatcatttttagaagaatctgtgactaaagaacaattaatcacatatttaaaaaagaatccaaaagctagttctgtggcatgcaacgaagatgggaaggtaattggagctttattatgtggcagcgatggcataagaggatttatatatcatattgctatatatagtgaatatagagttaatgaaatcgaaaaaagaatgttagatcgttctttgggaaaattgaaggaaattggaataaaaactggttttatatttacgcaaagcagcaatcatgatatggaagtagcttttaattctatagggtgggttgtgattcctaatgaacttaatttgggaatttagcctacaaagtagatgtatagatattatataaataccagagatatatatggcactttataaatattataatgaaagctataatatacatatttaactataatagatactatgtggacaactacttctagtgtgtcaatataaataaaaaccatgaatttgaagaaatatgacgaatactatgaataatatcattaaatggataaataataaagaatataagtataacgcagatgatatgataaaacacgtcgttaagagacatgattttagaaataacttaatcttattagatacctataggaaaggaaaaaaatcttttgagaaagttattgacaagattaaataacgatggtaagatgtaattcgtcgctgaaaagcacagaattcaataacttaaagctggtaaaatgtttgagaaaaatgtttgaaaagtttttaaaaaaggttgttgacaaagtctgaaagcgatgatatactgagtaagctgtcagaaacgacagaaacttgtaaagccttgtaataagaaggcttagaaagaaaaaatggtctttgaaaattgaacagaataatataaatacatttaagtaaaccagcaatttttatttgagtaagctaagattaaactttttattgagagtttgatcctggctcaggacgaacgctggcggcgtgcttaacacatgcaagtcgagcgatg

SEQ ID NO: 176 - DNA, 6277 bp, Clostridium beijerinckii
caaaaacctattgcttgcattctttcaaaattaaatgatcccaataagaaatttgaacggataaacatttttactatatcacttttatttaatttcttttcactcattattttatctcctttctgtacttacattaactctgaatcatcaatatcatcaatacttcctgttccagctactgctactttaccttcattagctattgattttatatggaatattgctgcaataacacctacagcaccaaaaccaattaaattgaagtttgtaaatgctgctagtagaaatccaatgaagaagaatggtagtaatgatttactattcatcatattcattaccattgcataaccaacaactactataaatccacctgacacttgaagtcctcttgtaataacttgtggtatagctgcaagtgctgcatttactgcatctgttcctgcaagtactcctactatggctgctggtatcgctacacgtattgcttgaagtgatagccctagtatatgacacatttctattcctcttgtgttacccttttcagcatatttatcagctaagtgttggaaaaatacagttattgttctcacaaatatagtaagaacttgtcctgcagctgcaattggtactgctactgctatacctgctccaattgattgtttaccgattataacaagtattgctgaaattacacttgcaagcgccgcatctggtgccatagctgcaccaacattcatccatcctaatgctagcatttcaagtgttccacctagtataattcctgttttaatatcccctagtacaagtccaaccaatgtacatgcaattattggtctatgaaattgtgcctcatcaagtacacttgccataccagtaattgctgcaactattactaataaaattaattgtaaagtgctcatttgtaaattcccctctttcttttaatttatatataaaaacttttttaaattttatatatctaatcttttaacaggatttattattccttctatcaaaatctaagagtttttaaaggatcttatctttggttttaggtaaaatttatgtctatataagttgtaattctttaaatttgtccatcaaatttactttaggatcttttgctagtttcctcacctctaattcgatgcctttttcattaagctttttaaatgcctcaatatcaacatcattcatgcataatgcatttgtaacctgtttatctccagccttatagcacattcctccaacgtttacagatttaataggtactccaccttcaaccattcttaatacatctgtagggtttgtaaataagaataaagttttaaaactgtcaaatttaggattattatatgcttcaattgcctttgctattggaagcacatatgcttttatccctggaggcgctacttgaattactaattgttttcttaagtcatctgctgcaacttcatcactgcaggcaaatattctattgcatccactatactttgtccaaactgttgcaacttgtccatgtattaatctgtcatctattcttacaaaactaatttccatctttatatctcacctttcaaatttcatattataattaaattcatgtaattcttatactaactaatcataggttgctatattatctcatcatctaaatcctctgcaatatttttagataaagttcttatagcctcctttcccgaattttctgcaattgataaaagttctgacacacttgaaaaatctctacttcctagaacctctaatatcattgggagattaacacctgtcacaatttccatattctcatgcttcattgcaattatgctcgctgcattaaatggacttcctccaaaaaggtctaccatgaacaatacgccatctgttgaattcattttttctataagtgaattgtatttttcagctagagcatctataccctcccctggctgaaaagtaacacttcccacattttcttggactccaaaaatcatttcagctgatttaaggatttcttccgagaatataccatgagtacctatgattactgctatcattatttcatcatcctttcctgctacatatattatttctataccaatatacctagcaattcccatgccaaaaaaagtgtgtcaacaaatacctttctccaaacatgaattctaaacgcatacaatgcggataagttttcaccttgacactctaaagtattatttgacacacttttaattgtattttgacacattatttttcttatataaactaaatttaacacacatctataacatcaatcatatagtatagctcatcatccgtcagctctattgataaagcttctttaaatattaaatttgctcttcttaacacttccagatatcttggatttaattctgaatcagatgaatcatataccagtccattatttaaaagcatcctttctaatgcacatgcaacatgaaacataattcttagtttagttggattctcataatgtacattcaaagatttttcgatagattttataaaatcatctaataacgaatatatcttttcaggattaagaaaggttaaaatctctgttaaagtttgcttacaaagattttttaaaacaatctgattttctccttttataaccggattaatatcctttccttcaattatatttcttaaaatattttctccagatccatcaattagttcttcaatcgatataaagggaattcccatattaggatttgctattcccacaagtgctaaaattttatttttccgcgaaatctgttttattgactcatttagattatttaatcctactgggattattctaacattatcgttaattgagatattctttgctacagcttcaactaactctttgagtttaatcgcagcgcccttacctgtggagcaaattgtaattatagcattctcttctcccattttaccttctgtcatcatattattagtatatcctctaaaatcagtaattaaatatgaatatactgaatttagatcagcatcaaaaattgagcattttctgactgcttctagtactagagccgttgataccatatcaatactcttaatatttatcttggtctttttcgttatagtttcaccaaaactatttaaagatcccatatctactaaaagtaatacacctttcccttcatctacttgcttaactttttcaataacactatctataatatcagaaggttttctttcaagcggcatatcaactgctgcaatattatctgcatcaaaaagttttttagccaccgccaccatgcttgtagcagtgcttgtaccatgagatgcaactactattccaactctttcttgatgtgataattcttgtattgagcttagaagtaaagctaaatattctatttcaacttctggaattattaagttatatctatcctctattaacttatgaatctctttagctactccatattctttactattagatgataatgttaactcaatatttgttgaaaatgatactgtgtttttctttatacgattaaataacgcgctgaaatgtaggcttatggcatatataaatctatcacttaactttctgctcaatctattttcagctaacatttttatttcttcagcaaaatcaacaatatctttatcaacaattttcaataaaccttctctacgatacgcatcattcttgaatctagcataaaattgctttaaatgaacatttatatctgttgttatataatttttaatatcctggtcactcataccttcttcttgtaaaacaaatgccttgtcctctataatattgtaaatattaaatggtggctcataagcgtcagtctctaaaaaagttttgttaccatcaggtttaaccactaatgtactaggaacccttccccaaaaattggaatcatcttttattttaccttcaaaattaagtatcccatttctcatactttctggtagtaaatctaaatttatctcaatacatttatctgtattcatgcaatttagaaatcctgtggcacaaactagctgtatatttgactttaattgacccacatttccatatgttgtacttccaattaatgcttttatcgattccgatgaaattttaatagtcttatttacccgttgagcttccttagaaagtaagtagtgtataagttccaatttatcttgtaatgatctctcttcaaagttaggaataactatggttataggaattcttctaataaaagtatttagtaatgtagaattaggatcttctgttgtagcacctattaacaatacgttagctttgcgctgcctatctgtttctccaagcttattataggttcctgtatccataaaatagaaaatcatttcttgcccttctggtggtaatctatgtatctcatctaaaaataatattcctccatcagccttttcaacaattccctctttttccttatcagctcctgtaaaagcccccttaatatgtccaaaaatatacgataaaagtaattgtggattattagcgtaatctgcacaattgaaaacaacaaaaggtgcatcttcaggtaacttttttatatattttgaatactggtacattatattaacaaataagctttttccaactcctgtacttccaattatcaaggtgtgaagtccattaggaggatataaaagcgcagcctttgcttgttcgatttgattttttaggctagtattagctccaattaaatagttaaaaggagatttttcttcatctcttaccacatcttcacttgaggcaaattccattatatctgatatctcttccaaatcgtctggtaactttatagataatatttcctcaaaggtttttctatcgaaataaagaacaggtctatttttaatcttaatgattttcgaatctctgcagagtgcattaagttctctcgacacattacttcttaatatttcaagatattctcctatttcctgcgcactaaatcctttaacttctaagagcttattctttgtaaatttttttgagttattttcgatataattgtaaatcctatcaatacgcttcatgatgctcaccttcttttagatttgtctataattaataaaaaactaactctttcaagtaaatatatagtatccttttaccaaaaaaaatacaatatacttcatcaaaagagtcagttaaaatcaattactataaatttactatatacttgaaacttttataccaataccggaatctagtactactttatttctaatatatcctttataacctctccaccaattatcattcctgcaaccggaggaacgaatgatatacttcccggtatttgtcttttaatagcgcacttcttagtaccaccagtacaaacacatcctgttttacatgtaacaacatcatcatagttaggttttatcggaacttcttctgaataaactacctttaatttttctattcctcttttacgtaactcggatctcataaccttagccaaaggacagatttttgtcttaaatatatctgtaactttaaattgtgtaggatctaatttattaccagttcccatagaactcattattcttatgccctttttataacaatattctactaatcctaatttagctgacactgtatctattgcatcaactacataatctacatcatcaggaattatagactctatattttcttgtgtaacaaaaatttgatgtgttataacattgcatgttctatttatagataatattctttctttcatcacttctactttaggttgacttattgtcttataggtagcatgcacttgtctatttaaatttgttaaacaaacagtatcatcatcaacaatgattaattcacctactcctgctcttgcaagagcctctatagtatagctcccaactccacctactccaaaaacaataactttgctattttttaatttatctaatccatctttacctatcaaaagttcagttcttgataaagaatgttgtgctgtcataaattttctctccttattatcttatacttttaattgatattataacacaaaaacaatcgaaaattggcagtataattattatatattatagccttaataatgattatttacatatatatgttaattaataccaaaacctttcttttaatttaacattagtgcataaataattttacaaatttatctattaaattgtcaaactaatgattataatatatattaagtatcatatatgtttaaccaaaatatttattttactataattt

SEQ ID NO: 177 - DNA, 6233 bp, Clostridium beijerinckii
taaaatagaagtcatttacttcatcgctagtatattttataaatctagcttgatgagaataagcagcgattccttttaaaccatattttatagtttctctaagagaacgaatatctggatctaagttttcatcgtacattattccagctttttcagcatcttcaagtatagattctttagaatcgcttaagttgtacagtgcttcaggagagctgatattttcagatttaaccttttctcttaaagactctttaatttcttgagactttttaagttggataagatgagatttaggatcaaaattaacattagttaatgtcataaataaagaatcttcaacaaaagaggctactgatgtgtcaaccttttcacttttgcttaaaagttcgtttgcatacacactgattccttttaattgataaattaataaatcttgcattgctgcaatttcaggcgttttaccacacacacctattttagtacatcccttacctccagcagtttgttcacattgataacaaaacattttttctaccataataaaaactcctctcatatttacataatataatactctggatatattatacaataaaacggaataataatacaatataattatataatattcaatattatataagaaataccacattgtgaggtgaaattttgtcaaaacattaattatgattataggatataattgacaacttgatattatttaaaagaatatgtaaatattaatttaataattatcttaatgatacacgtgatttgcaattaaataggtactacgaagtgttttaaattaccacaaataaagaagacaaaaaaacaaacaataagaaatataaactaattcatcaatgaaaaaagcaagctggattggaggaactattatgagacgtaaattaaaatatattttaatctttgcttttggtgtattgcttattggttgtaagttcggtaaaactgtaccttctcctgaaaatcaaataaataatgaacaatcagaggcaaaacctgatgaatcagatgagaaagaattaggtgaaaaatctagtaatgaaccaagtaaaaattctgatggaaataaagaagaaaagagctaggcagaatctaaagaaaacaataatgaagcatcatctgaaaaatccagccaaaatgttactgagaaatctgatgagaaagctacatctgaatcacgcgaaatagtcgaagaagataagactgttgcaacaaataagaaaaaaattatttatttaacatttgatgatggaccaagttttactgtgacaagtaatgttttagatatattaaaagagaataaagtaaaggcaacattttttttgattggaaatcagattaaaggcagggaagcggtggtaaagagaatttataatgaaggaaatagtttaggcctacatagttatacacatgactataacataatttacagtgatgaagataactttattaaagaaatgatcgattgcaggaatgcaataaacaaggttgctggaataacacctaatataattaggtttccaggcggcggtcataaacgtttaagtaataattttcttaaaaaattacatgataagaattttaaagtgtatgattagaatttggaaaatagtgatggattaaaacctaaaacatcatcatgtgaattatatgaaaaagctataaatggaagtgaaaataagaataagattatattgcttttgcattgcacaaacaatcaccaaaatacgtgtaaagctcttcctcaaataataaaatactataaatcaagaggttatgaatttagaacaataactgaagaaacaaaagagctatattttccaataaagaaataaatcgtatacaaaaagtctaaaaagatatcgtaacgtgaagatattacaaatagggtagatgaaacggagtgtaacaaatgaaaagaagaagatttattaggaacactattttattaattatatttgtttttatattaaattcattgaggtatgcagttaatgcggaatcaaaaattcattctaatagtaatatatctatattagttgatattagtgaagaaaggctttatttaatagatactgagaaaaatataatattaaaaaaatatacaatagctagtggtaaacaagaaacaccttctccggtaggtacatggaaagtggtacgtatggctaaatggagtggaggttttggcacaaggtggattggattaaatgtaccttggggaatttatggaattcatggcacaaataaaccatactctattgggagcgaagcctcccatggatgtattagaatgcgaaataaggatatagaggaattatatgagtatgtaaagcgtggaatgatagtatgcatatacgcaggcccatatggcccttttgaaaaaggatttgtaaatttaaagcctggcgatagaggggcggatgttttagaagtgcaaagaaaaatgaaagaaaaaggctattatcctaaaaatttagatggaatatatggcgaaggaatgaaactgtatgtaataaagtttaggaaagaaaataaccttaaagaatgtcatgatattaataaagagttttatgaaaaacttgggattactttggtagattaaatctttatccaattattatatcatcatcaacagcattattattcatgttgttattattgctgttattttggttaccattattgttattactaataaacagcctatgcccacaatgaagtttccaaggacgtttagctcttcagcatttttaccttttgcaagagaaataacaattgcatttgttaaaattagagaatcttcaggagttaagttttcaaaacctgtcattatttacacccacttactataacatataattaataattatgacatttgattaaataatatgagtatgggtgttaaataaatagttgtatattaataatatattattagtttattaaaaagcattatttaatgtaattataaaattatgagaggtaataaaaatgtatgtaattaaaaagttcatagaaacgattttgatatcttatactattctcttaaaatatatgttaactttatgcgaaagttctttgaaaattgaatgtgcgatgtttacaaagttcggtataacaagtatatacttgtataggttataagcataaatattattaaatttattggacataatagtaccgaaaggtggatatgcgatgaaaagatttactgttttattattggtctttttatgtttaacgcttactgtattcggaataaaacctgcatttccagttacaatcagtaatacatttaaccaaggtatttataaaatatctgattttaacccttcgaaaaacagtgtttattcagttcaaaacgtttcatcaaaggataatatgtccattattattacggatgaagaacaaaatatacttcaatctatacgactaaaacctaattcagaaaagcataacacaatacctataggtcctaatgacacaattatattacttggtaaaggtgcagtttttgttaatccattggaacttacagagtgatgtcgtttaattattaattagcaaaataaataataaattagaatatcgcactattcgtaaaactgagaatagatttgcgatatttttttatttaagatactgtttcgtaataatctagacaaagagatgaggtaatgcaatgcaaacattaagcaaaacagcagagcaatctagaaaatgtcctaatgttaaaaattgcaataataagagaattgaagcatgtgcattagctgagttacctaagcaaacatagattgcagtactactaatgaataatacaattacaccaattactggatttaaggtgttgctaatacaaataagaaaatttaaaacaagatctattaatggtttaagttttgtgttggtttatattgatactagggtttatgggaaatgattttttaaattggaggaattaaatataattaaaaaattttattataactatatcatcttcataattgatccacaattaagatgtagaataaacacataaagagaagacaattgagggagtgatatacaatgaaaaagaaagttatgattctagtattagcaatcatagtaactgtaagtggcatgtcacttgcatatgcagaaggtggcaataatatagattctaataaatttaatggacaagatagtggggttaaatcattatcagattatagaggaaatatgatgagcctgatgggggatggagttcaatcagatgatgatatgaataaaatgattgaattaatgaaagagaatggttttactgatgaagcaaatgctatgaaaaatagagattttaataccatgaaaaatttaatggctaactaagtgatgatgattatagcaagataattgatataatgcaaaataatagatatggatctatggctaatatgatgaaatctgtaggcagagaaaatatggcagaatttcataaaaatatggtgggttattaatatttaaagtttaaaagaattaaaatagttaagttcgcctggcacttttataataagtattgtatataaataaattataagcaattatttaggcaatatttatggatattttcgatttatcgccagaagaactcactgccttaacagcggttctatctataggaattgcaaaacaatatactgaaggtgaccagttaggcgtattggcactctttttcactagtataggtgatattctggcattaattcaactacagagattaagtatagctgcgagagttgagaaggtacaaaatgagcaaagtgcacaaaatacacaaaatgataaaagtactcagaatactcaaaaacctaatttgaatgaaacaaaggcttaacgttaaaacattatgtatcattaaaatgaatatatttttaatatatatgtaaatgtaataatacacaagctaatgtagaattaatagaataaattagtaagatgagtaggtagttttagtgatgagcttaaatttaattgtcaacattaaagacatagaccattatatatgttcataagtatagatacaaaagactttgtgtagattacgcgaagtcttttgtgtattatattagaggggaaatataatgatatagtaatctcaagtttaagggaatgtaatatttaatttttatatgaatttcttaagctgatgacattaggagaaaagaaggcaagtacacttcgctaaataagtcgttgtcccgtaaatgatacaagcccataaggggcttgcacacttcgggaaacgttatttagctaaatgtacatgccttcttttctgtattatggtttattgctgcagatgaagtagaaggtgttaccatggtttttggtttattgtgttaatggagataatgctgcacatgcagattaatgtttttgtgaaatgtgagaattggaaaagaaagttaatgtttttattttcctatgacgattatttaaattcacttctaagattctaaaccagaaagagtcaatatgtaatcccaaggagctttgctcaagtggaattacattgacactttcttcagtggttaatttagatgtagtgattggattaaaggctgcgccttaaatctcatgaacagtagaaagcatatgaaatatagagtattctagagattaaggatagatcctatttggtgtattacatgatttatggagaagtgatgcatgcgcataaagaaaagggcgccttggacttgcaatcacaggatagagataaagtttattggaagttggcaggtccacaatgtacttgcttacctgctagtcctttttagtaatggcgctctttccgcttaagaaatccaatcactaaaaataatagaatagatatttataaggaaattatttttagtgattcggtttcttgcgcttcaataacactcattactaataaggacaggcagaaaagcaattacattgacggcgccatgtggaataaaagtttttttaatagtagttataatgagagtagaatagattagacagagtaaattaaaataagaaattgttctttgaaaactaaataatatgttatttacaaaatgtgttataatatgttctgatagtagtttttgataaaacaagacagatttttgtttatagtagataaagggagtattttaaatgggatgtattaatattaagcgaatttggtc

SEQ ID NO: 178 - DNA, 6020 bp, Clostridium beijerinckii
gatgagatttcccatagcataagctagtaagaccccttgaagactacaaggttgataggtcagaggtgtaagtatggtaacatatttagctgactgatactaataggtcgagggcttgaccaatataatcaagttgtaatatacattaatagaggaagctcgactcactggcgttcgctgagtaagttcgagtattcagatataaaatttggaccctcacttatgtgcaattttgaaagaacaaattctttcaaatagcgttccgcgatagctcaatggtggagcactcggctgttaaccgataggttggaggttcgagtcctcttcgcggagccaatatctcgtgatgatggcatagaggtaacactccttcccatttcgaacaggaaagttaaggtctatagcgccgatggtactgcatgggagactgtgtggcagagtaggacgttgcgaggtaagtattaaagatagtcataatggctgtctttttttttatcaaattttgggatggtgaacatatagatatataaaaataggaatctcaccaataatgtggaatattaatggttattctgttaaaatatagatgaatatgctagaatttgtgttagtgaatattatatttcattatcatatgttatctaaaaaatttaattgatcaaagtttattttaaaattatcaagatatataaaaccaataaacttataaagaatgaattatattatttataacttatatggttgaaatttcatttgagaatctatatagtaattaggtaggaattatcgtagctttaatatgaatttattatgctgactttatagcgttgttaagatgaactatgataaaaataactaataattaatttacaaaggagacagatatgcctaatatttttgacggacttagaaaaatttcagataatgacatcattgaacaaattgcattacttgaaacaatgaatgtgacaaatatatcaaagccaattatacaaaaggctaagaaaagaactataagtataattaattttataggaagtaaaataggaaaaaatcgtgtgcttgaagaaccggaagtaaaagaaatatgggctttggttgacgaaaaaaaagaagaattggaaaagtgtacaagaaatgagttaaatgaaaggttgttcaacattctttccgaaaaggctaatgatgatttagagagtgcaacagaggacgaagtatcaatagaggtaatagaggaagcagctaaactatataaagtgcataaaaacttaacgccaaaccataaggctgatattatttattcaaaatataatgaaaagcttagtggtaaggctaaagaatatataaatggacaagcatttgtagatctacaagaaactacaaaagatatagaagaaattataagtagtatggatgaagaacaaaaaagagaatttactcaatcagtagatgttgcaaaattgacatttcttaatgtgtggaaaaaattagataggcaacattttataagacttatatggttatgcgttaaggcttatggaggtagatttactgtgaaagaagaagaacttccgagttttgtaacaagtgaagaggaagtggaagcatttaaaagagaagaagaattaaagaagtcgcaggaagaattgttaaagttgaaaaaacaaatagaattatgtaaggataaaataaattctattgagaatagtttagagaaagaaaaacgtctattgaagagcgcaattagaagtagagataaagcggaagaagatataatagatttggggaaaatacatattaaattaacatcagtcaagaaatcatatgaagatgaattaaaagagattaaggttaaaatggaaaacgcaccattagaggaactagactcacttatggaagaatttaaagtagttaagtttgaagaaattgatgtgaataataagatttcagatattaatataaaggccacatataagaaggaattgatagatgataatgttaaagcaatatctattaaagaggaaagtataaaaaacattggaatggaatttcaacatttaaaagaggaagcacataacttggtagatgcttataacaaaatgaaaagtgatgtgagaaataaagaagaagaaaagaagagtgaaatatttaagaaatggagccatttttttaataagtttacttttaattttgataacttgggtaatgtagtaagctttacccgaagcgaattacttaaaatcgaacaatgtttacatgaattacattttacaaatgatccaatggctttaagcatgggagtaatagaaagtaaaggcaataagaaaaaaaaggaagaatatgaatacatagatgtaagcttcttagatggctttaaaatagagattcagtttaggatattggaaaatggagaaaagacagtacatatagatgaaatcactccggaattttaaattatctcataagttatttttttacaagtatttggataaaattataattatggaatatttgcttagaatataaggtaaggagataataaaatgaatagttctgaattaacatcagaagatgttaatgaaattcttaaagatcagaaagagttttttagcactcaggctactaagaaaatagaatttcgaattaatcaattaaaaaaacttaaagaaagtataaaagattatgaaagtaaaattactgaagctttaagtcttgatttgggaaaacatgaatttgaatcatatgtaacagaaataggatttgtatatttgagtatagaaaatacaattaataatttaaggaaatgggcaaagcctaaaaaaacagaaacaccgatatttttaaagcctggaaaaagttatatagttagcgaaccttatggaagcgtgttaataatcggtccttacaattacccgtttcaactcgttattgagccgttaataggtgcaataagtgcagggaattgcatagtaataaagccttctgaaatttcattgaatgtttcaaatacaataagtgaaatgatttcaaaaatatttgataaaaaatatataagctgtgtagaaggaagtattaagacaaatatttcattaataaatgctccatttgattatatattctttactggaagcgtaagtgttggaaagatagtaatgaaagcgacagcgcaaaatttgattccagttactctagagctaggcggtaaaagtccagtaatagtagatgaaactgctaatatcaaaatttctgctcaaaggattatttggggaaagactttaaatgcagggcagacatgtgtagctccagattatattatggttagtaaaaatattaaagatgagcttattaaagaaatgaaaaatgccataaaagaattttttggagataacgttaaatctagtaaatattatggcaggataataaatgataaacattttaacagaataaaaaatttaattgataaagataaaaggggaattctttatggaggaagttatgatgaatatgaaaggtttatagagccaacaattatagatgtatcagcatttgaatcggaaagcatgaaggaagaaatatttgggcctgtactacctattattgagtttgttaattttgatgaggttgtaatgaaaatcaaaaaaatgcctaaacctctggctctttatatattcactaataataagaaaatacgagaaagagtcatcgaagaaataccatcaggaggcatttgtataaatgatactttaaatcatttagcaaatagtaatttgccatttggaggtgttggaaattctggtataggatcttatcatggagaagagagctttaaaacattttctcatagaaaaagtgtcctgaatagaggaacaaaaataaatattagaatactttttccaccatatagcgcaaagagtatgactttaattaaaaaatttcttaattaaaataataaatttctattaggaaactaagttttaatgttattaaaaagcaaaatgctgatatatcgtaggttataatagtaataattttattatatataggctacgatatattaaaggttagtataatttccatagaagaataaatttattaatggtctaatgaaatgataagtagcttgaaattttacttataaatgatgtagtgaaaaattagagccataacttcgaatataaatcctattgagcatactccaatccaaccgaaatattgccagcttaaaggtgctagaaatgagcctaatgatccaccaagaaaatatgaaaccataaatacagtattaattcggctacgtgcttcatcaccaagctcatgtatccttgcttgattggaaacttgaccagcttgggttcctaaatctagtagtataacaccaacaattaaaccataaagtttatatcctaaaatgaaaaaacatatataagataaagtagaaaaaataatgcttattcccactgtaaatttaggggtttttttatcagcaattcttccaacaaaaggtgcggcgccagctccagcaacccctattaaaccaagcaatccagcttcacgtgttccaagattataaacgtgagaacctaataaaaaaataacagaagtccaaaatgcactgaaagctccaaacatcaatgctccatttatagatgcttctcttaaagttttctcttgtttaattagaggaaatatggagagtattagcttagcgtatgatatactggagtttggtatgcttgttggaaaaaagttttttattattattgcaaaaagtgccattaagaatgcagcacagaaatatactgatctccaaccaaaagcttggccgacaatcccactaaatgttcttgatagtaatattcctattagaagtccactcataacattacctattatttttccacgttctgaaggttctgccaaatgcgcagcaaatggaactattagttgaggaattattgttgtaaatccaactaacagagaagcaattaataaaattacgtaattaggagaaatagcaactaatagcaaagaaataccaacaactataagcatttttataattagattacgacgttcttttatatctccaagtggaacaaatagaaataatcctagagcataacctatttgggttagagttacaataaatcctgcttgagattctgaaatattaaagtttatagaaatttgtgttagtaatggctgaataaaatataggtttgcaactgtagccccgcaagtaatagccataattaatattataaatctgtttaatttaaaatttgatttatgagtcattttaatcctccacaatactgtattgatttatgtatagatactatacatataatataaaataaaataccttgaaaaggtatcttatattttgtctttaaattgctttagaaaattatacaaaaattctttattttctctgctagcacttctcaataactcttttataacaagattgtattggttgtgatagcttttatgatttttatatgccacctcacctttttctgtaagcttcaatattagttttgaattactatcagaactcgcctccttaaatagatagcccttattttctaatctctttatagtttgtgagacagcacctcgcgtaatctcaagttttcttgcaatagctgaaatatgtaagccctcattttcttttatatattgcagcatgtgtatttcggaatgatatagatttgaatctgttccaaaattttttgctttcaaatctttttcaaagaaactacatattacttccagaaatatttcactaatttctttattgtctaataatttatccataataaatattgtatagatgctacacaatgttgtcaaacgttataatgtaatagataatgctttagtgaagatgataatgaatataaaaatatactagttaacgtatattaattatagttaaaaagtataatgataataattttataaattttctttagtctatatacaatttaaaataaattcaaatataataggag

SEQ ID NO: 179 - DNA, 5980 bp, Clostridium beijerinckii
gttataattaaatcaaaaacgcaattataaagcagaggtattaaaggtaatcttaatgaaaaaaattatttatctagatcaaaataagtggattgaactttcgcagtgtttttatgggaaatcagacaagcatagagatgtattgggtgttattatcgaaaaaactaatagtggtgaatggatatttcctatttcaataattcatcatattgagacagaaataagggaacaggatgtacaacgtcagaagcttgctaaatttatgggagtgatatcaaaaaattggacaataaaacccaacttaatagatagaaataatgaattggaatgtaattttaataataaatgttataacccaattaaacaagactatttaaatgtaataggacaaaatttagatgatgttaagataacattaaataatagagttttagatactaatataatggaaaatttgaaacaaagttcattagattataatgtatttgaggagtttatagaaatacaacataatacaggagatagagaagaacaatttgctgataacgaatttcacaaagagacattagagtattttagaaaagaaagtgaaaaaaatagtgataaaagcatagaagatcaatttatatatttttatatggactgctttaaaggagaatattcacagatattaagaaaaattttgccagagaatcaaaataaaattgcttataaaatgtataaacaaaaattacctaaatctttttatgttaaaatgaaactaatatttgaaagtgtaataaaaaataaagaacgtaaaatagataaaaatgattttaaagatattatgtttttatcgatggctattccttattgcgatgtagtaataacagaacggttttggacaggtttgattactgaaaatggtctagacaaaatgtatgataccgtaatatctaaaaatattgataagttgattcaattataatgtaattctaaaaatattattttagtaaggttgtgttaatatggatgacaaaaatggtactcttaatttgttatatttttcaatgatttttagcattatttctttaattgcaaaaattatatatcctatacctacattgggtgggatattgaccaatatacttaatcataccaatttattggaaactatatcgtattggtttatattaataactattttaattgattttattgcaatagtatgcattgctttgtattctgcaaataaagtgaaaagtattattaataattttctaggtaaatatgattataattatgacgatgatgaactatcttcaagagaaatattaacgttaattggtggaggtatattttcaattataactttatgtgtaatagtaaagtactctatatttttaattattggtcttttcattctgtgtacattatttggtggaaataaaaaataggattaatatgtgggaagtttatatttttatggtaactgatgtgaatttaacatataattaaacatatatagaatagtttgtgggtgaatatatggctaaaaaagtggggattagttttaaagataataatgaattagaacaaaagctatatgattttttaaagaagaaatctatactaattggtgaaagcaactatataaagcaattattattagaaaaaatgcaaagtgaagaggactgtaaaaaatagtcttctttttttatatatttttttcttccatgtggaaactttttattctttcaagcataaaatatatcaaaagatatgaaacaggaagaaggattcaaatgattttaggtgtagatatcgggaattattatactaaaagtagtaaaggtatcaattttctatcaaaggtatccaatagatgtggattagtagaaaatgaagctattatcttagacgggaaaactatgtatttaggagaaggtgaatttgatagtgaatatcgaaaggcatataaagaaaatttattgtatttattgcaaggagcaatacaaaaaagcactattgataagcataataaagtagttactggattaccattaagccagtataaacaagacaaagattatctaagtaatagaataattcaaagtggaattgtggatgatgttgaggtagttccagaaggagttatagtattaccaatagactttgaggggattgcaattgatattggaggacgtacaacagatatagcactaataataaaagaggacaatgtccgtaaaattaagcagccatttagtttaccaaaaggcatgttgaatttagaaaatgagttcattaattgtataaataataaatatggtttggatttattacaaagagatgcaaatagaatcctaacaaatggtctgtttatatatggtgaaaaaaaagaatttagtattgatatgtataaagattttgtagggagcattattaaaataattcaagtagattattctttgaaaaccaataacttaatgttaattggaggaggggctgaaatactatttaatccatttaaaaagcgtattccacaagctcaactcattgaaaatagtttttttgctaatgcgttagcatatgaacaagttggaagggggatttggtaatgaaaaaggtagggataagttttaaagagaaggaaaaagacttatacaatttcctcattaatcaaatatctccaagtgtctacatcaaacagttgctaaaagaacaaatagaaaaagaagaaaagcctaaagaaaacaatagtattaaaaataattttaatttctaaggggtggatatatgtttgatttagatttaaaagtattttatttcttttattctcattgtaaagttttaggttcaatttttggatttggagcatttgaaggtgcaataatgtacattagtgttattgcattagcaatagttaaagttaatgaagctaagaaggtgaagaaataattgtttgtagaattaggaatttcagttggcttagtttctttatataattactttaattcagcagataaacggaaatttaaaaacagttttaatgaagtaatgctgaagactggaataaaaaacaaagatgatgaaacctttaaaatatataaaataatcccaacaagttatggttacatttgttatttaagaaatactaaaggattgagtatagaacatttagacagcaaaataaatatacttgaaggtaatttaaatagcattgtacagctagaaaaggatagattcaaggattatataaaaatgtatgttgtaaataaagatatagataaattcaaatttgagcctgttaaatgtctaaatcatttactatggattggtaaagattttaaaggacaaaactatttcattgatgtaaacaaagacccacatttactgctcggaggtgcaacaggtacaggaaagagtttcttattagcttcaatattagcaaatttaatttatagctccagtaaatatattgatttatatctattacaaatttgtaaatccgaaataagtgcctttgaatgttgtgattgtgttaaatatagtgcctatagtgaagaaatgtgcaaggttgcattattgaaattattaaaagaattggacagacgtagtgaacaatttaagaaatttggaatccgtaatattacgcaatggaataatcatagaaaagacaaatacatgaaaagaatatatgttgtaatagaagaattatcatttttcatggaaacagaattatttgaatatgttatgaaaatagcaaaggcaggaaggtcagttggaatacatttgataagttgtattcaaagaagcacagccacaaatctgccaccagacttaaagagccaaatgacacgtattacatttaggcaaaaatcaagtatagattcagttaatatcataaatacagctgatgcaaccaaactaaaagaacgtgaatgtattgttgacggaaatagtgattatcagcttattaaaacaccttggttagatgaggattttatattgctgcataagtatgttgaacaaattaaagtacctacgcaagatgaaaaacaggaaattttaaatgttaaaaagattaataataaaatctattctatagagcaaccacaaatcgttgacattgaagaatctgaaataaaagaagaaaagccaaagaataataaaactagaaaaggagtagtttctatggaggactttaaaaatggctttaacagaaagagatagagaaattttaacatggattcaagattataaatcaataactttaagtcaatgcacttatctattctttaatggtaattatgaggggtgtaggagaagactaaaacaattagaatcctttggattattaaaaagtattcctaatgtattacttaaaactagagtatattatcaagaacgattaataagtgaccatgatttatttatatatgagttcttaaaggttataaaaataaatggtggagaaataattcaatttaaaatcaaaccacaatatcttgataaaaagattgtacctgattgttttataatattcagctacaatggaaatgtattctttatattattagaagtagatttaactcactatacttcaaattcaaaaatgaagagatatgaggaactttataagacaggagaacttcaaaatatatgttgcgaaacatttcctatcgtggtgatagcaagaccaacacaaggtattagatacaacagtaacaacttccatgtattgtatttagacttattttataataatttttataatcttttattacacaattcttccattatataatacttcctattttattgcgtaagccaaataaggctatgactaaattgaaaaggatagattgtattttatatactacaaactatcctacagtacatacaacaacacttcctacaaaaatacatattacttttgataaaatttaaaccaaaccaaagaaaaaattttatacaaaacagtaatatgaaaaaataataggaggtcgatgtatatgaattacatcattgcattattagctttaccagttgtgataaaaatattcactcactttggattacaaaagctaagattaatacccaaaagcgtaattactgccgaaatggttattaatcaaatgaacaaacaaaaaattagacccttgaaagttgaattactttataacgatgtttataaagattttcacgacaaattcaaggaaaaagaactagatagacaacaaatagttgctattagaaaatacctaagtcaacacgtagagcagtacccacataagaaatttaaaaatgatatacacgcaatttacacaatgctatcagccaaggatattaaacgaagacaccttgaaatagtacaaaaaataatagcttaattaattaccttgaagactatacaaatttatttttgttttagtcttctttttaaacacatatacaatgtaggatttcttatttatagtttatataaaataattattgtaaagttggtaaaaaaggtatagtattatatcaaggtatacattgatttgatataagtatttgtataaatttgtattaaggtgtatattgataatataataataacagaaattgctataaacttagttatatagccattttagagtcatgatgacgatgacgttcaagaagtttaccacaacgctgaattccctgaaggatgggatgaatagagagattacaagctctgaaaagtgtgaaaatctctgggttaagacatacttataaaataatgacactttcgatatcaatatacatagttaattgatattggaggtgttttttgttacttgtagattttctaaattacttacatactaaagcaggtttatttaggggctgctccaaattggcttaagtgtttggaatagtattatgtatgatattttatggaatactaagtgcatagatattttaaatatagggtaaaaacccttgcacttaggagtgaatttatatg

SEQ ID NO: 180 - DNA, 5586 bp, Clostridium beijerinckii
attgtgtaatttggtttttagcataagtaaattatacaatgaatgtgagttcttcggaattcacattttttatatctaaaaaaatgagccgctacaaaactaactatgttagttttgcaacagccccatcttattatatatttaaagcaaatgatcgggaaaaacctcacttattactgatatggttcaccgtatcagcaataagcgatactccattttccttactctcttattatatttaggcacaatatttattaatcctagtttgctactacttgattattttttattttattattaaaaataatatatagtattgctccagttaaaaaggtaattatttctgtaatggtcatagaccatataacaccatgcaatccatagaaattattcaatactattatgacaggaataaaaagaattccttgtgtaattcccataattgttgatggtattccttgacctgatgcttgaaagattcctgtaaataatgtagtaaatccattgaaaagtgcggaaataagcatggctgccatgatataaactccgacacttaatactgctgaatcattagaaaacagacgaataattacatttctaaaaataaaaactaaagtaacaaatccacctgataatcctaaaatccataaagctgattgttttatactgtcttttaatctcttaaagttttcattagaaaaattatatgcaattaaagggataattcctaatgcgagtcccattgcaaggaattctggtacttgtacaagtctcaaggcaataccaaaactagctactacactttctccatatctaattgaataattattcaaaagaagtgttgtaataattagaaaaccagctaggaacaattcagaaaccccaactttatatatctctattttatctttaagggaaatattaaaattcttaataaatccttttaaattctcgctttttgtttccaagtagtaaatataataaattgatgaagctatattagccaaaatcattgatactgctactccaataacattaaatttaaatactagtataaataatgggtcaaatataagaccaaaaattgtacttacaaccattccgaacattgattcttttgatgctccttctgctctcacaacttgctccaatgcgaagttcattataattgcaaaaccaccaataaacatagttaaagaataactttttgtataattaataatagcagaagtatctgcccccaaaatcttaacaataggattaagtgctattatagcaattattccaagcaaaattcctatgataatactgctataaaaagaatatccagctatcttcttagctttctctttatcttgtttagcaataagacgagttataaatgttccgcctccagcccctaacatatttccaaaagccattagtatagtgaagattggtagtcctaaagtgatagcagttaacatatctgtattgtttaatagtccaataaaaaaagcattaataacgttatatattgtacctactgacataccgatcatcatgggaatagataaatgtgcaattgccttagtaatcggtgcactttctaaataatattcgtttgaaaatttttgtttcataatttcagcctccataataagtattattagaattcgtattcttagaattctaagtttttagttataagttattatattaataacttatagatttctatctactttcaataacaaagctaacaaagtttccttctcttgttccgtcaagtttgcaataatattttcctctgcctcagctaccaatttattaaaatcttctatgagttcagcacctttaggcagtacatatatatatttttgtctctcattttctttaggaattcttctttcaatatatccttttttctctaatccttgcagcatacttgtaatacttgcttctgtacgttgaaagacttttgccaaatctttttgaataataccactgtcttgatgttcataaatataacctatcatacgtccttgttgagaattcaatcctaactttttgactttttcatcagaactgagtttcatttttatcgcaatacttctaattaattgtgaatatggtgtttctacagagtatccagaattagtcattcaaattcctcctaaactttacttagaattctaactatttatagtttaacaattagaccttcaagtgtcaatatttatttcttataattatttttatatttataatatttctttttttacatgctatcttttacttatgatgaggttcaccattcattatcctaaatcatcttctaatattaattctttttatcctattacatcaactacccattctagacattatgcgaaactaatctagactctaaaaacattttattgcaaaataactaaatttatcccactgaaaaaaattactcttttcgaatttatataatataggttttaatttgaggttattaatcaaaataatttcaaaattaaatctttatattccaagtaagtgtattaacatgattttttggctctaaagagtcatgaaataaatacctgtgagttgcactctcccctatggggtgaatgtgtcttatggattttcattaaaatttaaaggagtgatgtattatgaaacacgagaaattaaaaaaactagttgctctcactttagtaattggacttacattaactgaaatgccgatgcttgctaaggcagcaacaacaaattcaacaataactacaaatccagcaaaacttgcgaatctaacggagacatcagtatcaaagcctagtgaagttccaagtaacatatggaaatatgcatataatgtagataagaaatttagtaagaatggagattttgcattattattatgtgcagttataaaaaaagagagtaattttggtgcaggcttatctggcagtccctcatctggtgatggattaatgcaagtggaaccaagtacaagaaatgcatatgcagcaaagtttaaatcaacatatggacgaacttatgatcatggaaatcttcaagatcaggtagcattaggtggattgattataaaggagatggttgatcaatttggtggtgtatataatggtttattgcattataatggaggtccaaactggtatccaggttgcacagactcatatggtcgaccaatcctagctgatcaatatgcaaacgcagtatataaaacatataaaaactatggtggaaagaaataacaaacaaaataagtggacaagtttattagattccaatatataattgacttttttaattgggagtttcttggacttagtgtgaaattgatatagttatttgaattgataaatatgataggactgttctcattattttttgagaacagtcctattttttagcctataaccttttttgccatattaatcatatcttaataacttttttaattccatgccttcaaacccgtattatacaagcatattcttcagaatattagaatatatattctagtattctgaagaataaatattgttaagaatatatcttcttaacaatataagaatgtcatgtatgttgcaattcacaatgcacatttcacaatttacaattacgactaaaattcttgcaatattttcagaattatgatgaataattatttttgcaacatatatatgttacagattgtgttaattcctgggtttcttttttatagagcatattattgaatatctaataacgatatctagaatctcattttcattatgaataaataaaataatatacgtggcaatgcaatagcagatagtattgcaatcgcagtatgtacttttttctcatctggtaatataaacaagaaaaacttatatcctaaaatgccaattaatccacccaaacaatttagaattatgtcatcaatgtctgatgctccaattccaaagatcccctgaatgatttcaacaaacaaacttactataaatacaaataataaattggttattactcttttattatttttgaataatagcaaatatgcaccaagaggaataaatatagctatatttccacccacattaccaaaagcgaatttttttatagaggcagagctactaaatagatattcctttatactataaaaaggaatgagattgattgacctatgatccaaattagagattcttgataaaaacaatattttaattaataaaagtatgtagcaaatgaaaacaccatataaaaagaatgttttgatccgttctcgtttaatcataattacccccttaaagtagaaaatgaatactcaaagcttttatctctctaagtattcatttttcacaagattattaatatatatattgcaattcacaatacacaattgcgtctaaaatccttacaattctttaataattattatgaagaattatttttgcaacatatattttttattctaatttagttcgttatattttaacataatccaatttacttaataaataatttcatttatttgtaataatcatttaagacttctatactcttatatttaaatcttatataagaatttaatctaattgtgtttaatttatgaaggagatactcttttttgttcaatggatcataagttgtttttccagcatccacgtgtgcaacaattcctataattggaccgcctaaaatttgacccaaggcatttatttgtccatttatagaaagtacagtggctctagccttatcgtctatatgtccattaagccatacactaaatataggttcatttatagttctaaaggtatttgtcgctaaatacgccattaacattaatctaaagttttttgtaatagcaaatataaacataaataatatataaaatatatttatacctaccaaaagctttccattattattcttatcatcatcaagtctatttgacataaaatgcataactattgcacttgacaccattcctgcattgcttctgttgtgtagccaaagcccacgcttttttacccagattatgtgctatttcaaatttctcatactcttcttcaacataaattagtccagttcaaagcaaataacctgtttccattaatcattattaatttcatgaaagttgctcattttcagtaaattctcaaatatattacactggtaatataccacatatttatccattaactaacaaaatactttctttacaacaatagaaataagtgctaatattaatataacgataataattatcaattaataataattataaattcaagaatataaataataacattattttagataaattaataaataagaccagctaataatagtcaagttaattttcaaaaaaatagtttttggaaaaagagtatggcaaacaaaccgtttcaaaacacgaacggttacagaaattggaataaaattaagcgactttgtttaaagagttattttccaggaacatttgcttatgtattttgggatctctttgctcaaacggagtttgatttcggagaacagcaaaaatgtagtttataattttatgcattatagcgactaaggcgattttaggctttttgcctt

SEQ ID NO: 181 - DNA, 5407 bp, Clostridium beijerinckii
gaatagattgtaagtgaatttgtgattttttattatttagctttaaaattttaaaaatagtttggagttaattaacaaataaaattgttgtagatgagactaaaatatagaaatctaatctaaatatatataacaaataattaaaaataatataatagaataattggaggagagaatgaaaagattaaattttatattaccaactttagaagataagaaaaaactcatggattataaaagagagtttattgaaaataatgacagcatggatggtacagcaggattaggtagtgctgaaacttttgaagaatggtatagcgcattttgtgataattcaaaagaagaaactgtaagagatagcttagttccagcaactacatacatggctgtttctgttagcgatgggcatttaattggaatgattgatattagacaccgattaaatgactatcttttaaactttggtggtcatataggctatagtgttagaaaatcagaaagacgacaaggatatgcaacagagatgttaggactagcactaaaggaatgtgtaaaactaggaattaagaaagtattaatcacttgcaataaaaataatattggatctgcaaaaacaatagtaaataataatggaatattggaaaatgaagtggatgaaggaaataggatcacacaaaggtattgggtttatttataatatctgtaaagtttaaaatattactaattcttatatagaatagaatttttataatagctaaatataattaatgaatatcaacaagttattcgtaatttagaagaacataaaagaacttatagcgattcaatttcagatgtatttttttcggatcaaatatcagttatagcccaaagtttcgtcataagtttaaggcatcagcaaaatttgataagagcacttcaaggtactgaagaagagtcaaaaaggctattttattcaagttatttaataccagtatattattatttaactttaggagatcaaatgatagcgtatattgataactattttacattaccagattaaacttaaagaaaagcataaataaatttataattatatattcaaggatcgcataacttagaacgatatgcgatctttttatattataatatttatagaatgaaaaacattacgttaaaacatgtaaagaaagtggggattaatatgaaagtaatagatttaacacataccatttcagagaatatgccggtatatccaggaacggagaaacctaaattagaagtcgcaagtacctatgagaaagatggttttaaggaaacattgttaactatgttttctcatacaggaacgcatatggactctccggcacacttattctctcaaagaacaactttggattcatttattgcggaacattttgttggaaaaggcatagtagttgattgcagcaatttaaaagaaggccaaaagattacgatgaagtatattgaaactgtaaaagaaaaagcagatacagcacaatatattttgttttatacaggttgggataaatactgggggacagatgcttactttggaaattatccatatattacagaagaagtagctgaatacttaataaaaagcaagaagaaaggggtaggtatagatgttataggaattgatcctattaaagatgaaaatttaactattcataaaaagctttttgctgaaacagatatagttgtaatagaaaatttgacatctttagataaggtgggaaatgacatttttacattctgtgctcttccaataaaatttaaagattcagatggagcgcctgttcgtgcaatagctattctagaggattaattatttaagcagaaaagaggattaaaatgaattgtagtattaaatcgttatacttatgcgttaaagatatgaatagagcaattgatttttatgaaaatttatttgagcaaactgtaaccgttcgagatgagatttatagtgtgtttgatattaatggttttcgtattggcttgtttgcttatgaaaaagttaatgaaaaacatgtttttggaaatagttgcttaccaagcatagaagttaataactttgatgttcttaaaagtaaattagaaaaattagaaattgtatttccaataaaacagattggagctaattgggttgctgaatttagagatagtgaaggtaatcatattgaaataacaactcctataacaaattagaagtttgtaaataaacagcggtagatataaaaataaaatgtaacaagggttttggttaatatgactataaatgttgaataattgcacaataaatattataatgtaattaatggaataattaggttgataaggaagtagagggaatttgtttgatagtctaacacaagataaaacttgatagatacacatttccaattttacatctctgatttcttagatagaattatttcttttcatatatcaatttaattattctaaataagttaatttaaataataattaagaggtgggtattatgggaataaaaaaaatgattgcaaatttactattaaatctttctagatctatgactaaatcacctatggtatcattttgtttcgctggtattgaagatatgccagagtcaatgaaaaagttaagataataaaacttgtttatatgattatttaacattataaaaggagatgtaaattggaagtgcaatacattgatgcattaattactatttttcaaagtatattgtttatttatatagttaattattgcttggaagaggagaaaatagtaaaaataaaagaattgatattaagtgtgatacttctatcggtagatggtttttatataacatacttacttggaaatttatcaatatgtatatttataacacatgctttaggaatattaattatgtattttactttcagaaaaaatgtactgaatccaataatagcatacagtttaatatattcaatagtaattatatgggtgtcgacatttggtaatatactatatgtaatgctagatgttaattcattggaagatcatatagcgaatatatacattacacttgtgtatctctctcagatactcttatttattttatgctttttatttagaagtaagattaggcaaatttataagctattactagacgaaagtaactccgtacaatacataattataataagtttcttccctgattttttgatttctttatataatatttcatacgatattgagccggtattatcaagaaatattatagttatagctttaattggatttataatatttaatataatagattttagaaagattaaaaaagattcggatgaaatatataaattgaatggaattttaacatcaaaaaatattgaacttaaaaatataaaagataattacaatctaaatattttaagtttatatgaactctgtgatatgaatatgtatcaagatgcgtctaacttattgaaaagaattataaatacatatcaaaatagcggaaatgtttatgaaaaggatgctgagggctcttcacttttatctctagcgactaaacatgttataagagatgatataaaagttattgtatccgataatgctgattttaggttaacaacaatgaaagagatggatttatatcgaataataattaatatagtcaacaatgcggtaaaggctatgaagaataaagggactataattgctgaatcatatgaggatttaaacaatatagttataaatatagcaaatgacggggaaaagattcccgataacataattaataaaatttttgattctggatttactactaaaaataataataacaagaatcatggctatggtttaagcatagtaagagaattaattgaaaagcataatggaaaaattaaagttgaaagtaatgaatatatgactaaatttacaattgtattgccaataaatgtggctgcataattgcatgtatatttggagaagttagttcatagaaacctatgctaaactttatatattctaaaagtctaattgattaaaatcaaatttaaaatgtagtcatttatacaacaaataaaataatttaggtcatttagaatctatatgatttagggaataaaagaatatctttttaataaaaaacggctattggacatttccagtatatctgaaggtggaaatctaatagcttcttttttattctctttacgaattgtaacctcctaaaaaataaaaaaggcagcaactttcgttgccaccaagtccattttgcaaaattagtataacctaagttatctatagaaatcaagggggagtagttaaaataatttagcatatagaattaaataaatagatccaatattgtactatagctcataattaaagattagttatgccagtatttacaatttatgatataatttatttatataaattagaagaggcagatgatttttgcagtatgggggaaaaaatgagtgataaaaataaggggaaagttactttatatttgatgaggcacgggcaaactattttaaataaagtaggaaggactcaaggatggtgtgatggagttctaactaaggaaggaattgaagtggctgtaaatacgggattaggacttagtgatgtgaagtttaaagcagtttacagcagtgatttaggaagagcaataaaaacagctcaaattgtcataaaagagaataaggcaagtgcggacttagaactaaaagaatttgaaggcctaagagaagtatattttggaaaatatgaaggagaatttgagaagataaagtttaaggcgatacttgatttccttaatgtaacttcatttgaagaaatggcagaaaaatatgattttcaaagggcatattgtgattcatgtgctgcattagatgaaacacatgaggctgaagattataatacagctttaaagagatttgtaacaactataaataatatatgcattgaaaacgaagaagatggtggagggaatattctaatagtagttcatggaggaatgcttagagtatttattgaacatttagataaaaatttcgatataaggaatatggataattcaagtatatcaaaagttgtatatgaaaacggaaaatttaaggttcaatctgtaaatgatagtagttatagtgaaaaaggtaaagctatgagacaaatactaaaatagtgagatgcttagtacttatttcggcgagctatatgaataagttcagattttagtttgtttggtatctatagatatccaaatttaaaactaaacttatgtgataacttaccggtacgccaagcaagggcgtaaaagataatgagggctaaccttcctcattattactatatagcaggtgggaatcctgcatgacaaaggccatcaaccagtcattagttagtcttgggctta

SEQ ID NO: 182 - DNA, 5291 bp, Clostridium beijerinckii
ttatttaattaaaaaagtataaattgttggaacgccgtatgaggtgaaagtctcatgtacggtgtgaaccaggggaaaagatggagataacttcaaattcttacctattggtataaactttctcaggtataaaaacagatgctacacctgagaatgtctatgctgtcgcagatgcaattaaaggtgttatggaagctaatactagagattattttattaatgaatcttctagcttagcaaatgcttaggatcttattctaaaaaaaatattgtaggaaactcgactcacattcgttcgctgagtaagtgattcacaccgaatcatagattcgagttctctacttaagattggggggaaattaaatggaatattctttatctatgacttttttaactgtagctggtgaaaaaagtactttaagtgtttctggtgttaaacctactcttacaaaagatgaggttaacgcacttatggatactgtaattgctaagaatgttttcaaaactaattctggtgatttagttaagaaatctggtgctcaagttactcaacgacaagttactaaatttgatgtagcttagttttgagtaacattatagaagcttgtctttatatgataagcttctattttttgtactttcttcattaagtaacttgactcatggctcattaatctttttccttataaattctattcctttttgaaataccattgtttttatattgattttagtctctccatttggtactgtatatttttgctctaatactcgaaaatacctcatgtctacaaactgctgataaggaatattatttttatccaagactttcttttctcttaataatgaaaatagtctatttcttcccattcttttaatgccaagaacctttgcaacatggcccatttcaatagaatctttagagcctgcaacatcatcataaaattcccctttaggttctagtaattttactttattttcggcttccaaccttgcttttctctcttcttttaacttagtagctgcagcaataagtaaatctggattatctaataattcatctgtagcatacatccctgttttccttatgcaaggtaacacctcatcaaaaatccaggcttcaaatttctctgcacctggtaattcagatttagcgactaagcgatatatatctccttcaggaattacactcatttctacattttggatagcatcagttccatcttttcttttccccgttactacccctactccgtgtttcacggaccctctacagtgtcttgaaattgcatcattaggctttttatatcctaaagcttttgctatatcaatcccaacagcataatctttattattaatttttacccatcttatttctccaaatctttcattcttgaaaattagtaaacctcccattttgattatccccttttttaaaattttatccttttaatccttaatcaataattcaaaatattcatttcttcatgtgactcatttaataacctttagatttggtttattagtttcttttttataattctcactaaactcattaataaaataatcaaagttacatttaacatacaacaaaccttttctttcattccagcttaaagcatatatcttatttattctgatttttgtatcttgattatatattgtccatccatctctccacataccaactggtggaatatcactatatagattaaaaggtatactttgatctatatttcttatacatcctttttcatccatgctaaaataaagacagccatcttcatttctatttgtgctttttccctgacattctccaccatgtttataattcctcttgcagtatgcgcattccaggcggttaggtaaatctttcggcctgttcattctaattctgtcctaaaatctttctgcagccactacaaacaagcacattattaaattcacttatatctttatcacttccacaaaagatgcatcctttactgtatttcctcaaaactatatcattattaaccttagttatttcgattgaatccccttcattaattcctaatacctttcttatttcctttggtattacaactctccctaaattatcaagatttcttactatccctgatgctttcatttaaataacttcccttcataacttaattttgattaattctcaaaaaaattcattttaatgcgaattttcactctgtaattgtttattgtgaattgtgctgtgtgcattgtaaatttacttaagcctataattattcctaatatccttctcaatttctactacataatcttttgacatttcatatattcttgaagctaccccttcatcaaatgctaataatctatcaatagaaaattcgctgctgactattataggcagaaaattaaggtacctataattaatgatttcaaacataatattcacgtcggtttcattgacctttcctttaaagaggtcatcaatcaaaaggacctcgcataattgatactttgaaattgtcctagtataatattcttcatcaatcatgttttgttttatctttgtgatcacatcacgataaggcatgtacactactttaattctttgttttaaaaagtttaatgcaacagcaatgctgcagtgcgttttaccgctgccaacctgtccgcataataaaatgctattgcgcctattgtttctaatttcatcaaactcagtacaataagctgcagcagtatccttaattttgcttgacgcttcattccaaatttcaaaactagagaaagtaagtttactttgctcaacattgattcctgaatacttccattcactttttagcttttctattttcctgcattcacaagctacagcaagaggttgcatatgctcctgcttaataagtatccatccggtgtcgcagcatttgtcacacctatatgaggtttgcttcaatcctctttctttcagcttctgtaagctttcgtggttcctttggcttgaatcctgcaaattcatttttatctgctgtgttactctttctagtgcctctaaagccatttttcttcacctccacattatcttctgaacatccatctctcttccagttttttaatattccaattgcataatttatgtctggacaatttttttgaaacccaacatccatagccttcttaacccacttttctccgtaaagatcaatagctgatctaagcgcaacatactcacaactacctggttttcctgttattttttcatgatactgcataagctcaattgctttaagatttatatcatcctctgctacagattcacttttagtattattatgttgctcaaagagacttgactgacttacatcttcatcacaagttgaacttttattatttatatcaaaaccattattctttttactctctatgtttttatctatctcttttttctttttcttattctctatctctttcttattctgtaccgttactgtaacgttacttttatttcgtgtaacgttactgatatttttagtaacaatacaattattatcatcacttcctataatattgttactgatatcttcattactattagctctttctgcacttatatcactagctgcttcattagtatcagtattagttttatcattaatatcagtatttgtagaatcttcttcactagtttctaaatttcctagtatatcatttttacctagatctctgttttcttctatagtataattctcagcgtaatctttctttcgttctaaattattagttttttttaattctacattttcattcaaatcttgattttcttctaaatctataaattcttctaaggcttcatcttcctgagtttcttccttattacttttaactaaattattctcttcttttttcttttctctatgattctcaactctttttctattttgttcacggaccctttccattccctctatgttctgatgcttatcccagttcacaattctaattactttatcagaagctatttcaatcatgccaaagttagataatacttttaatgcaatcttaatatcctctaaaggcctagaaaataatacagctaacattttggcagtaagaggttttccttctgataagaaaacctttccattagcattaagttttccaccaagtaagagtattcttatccacacgtaatgaattgtatccctcttaggcattgaatctattaacttcattttttcatcatcatgcatattagtagctaatttaatccatttaatatctgccattatttccacgctcccataaataaaattgcctaaacctttcgagaccattccatgatgggtttaactcaattaacttacaaacatgtatataacatttaaaaatcctaaaattcatttgtaagtcctcactttctttttatacatttttattaaaagttgaatccccatacattctaaatcaaggtgtatgaaaataattttacatttatgtttttaatttaagattactattttcttaattcttggtgaaccatagaaatattttcaagccattgatgaaatagttttttatctaccatcaccttctttcctattttaaagaatggaaaatctgaattctgctttgaaatctcttcttgtaacgtattgagaccaatacctgatatataagaacactctttaagggtataagtaagtttatctccagcattctctttttcactattttttcttaattcaactaaaatttcttttaataattcctccatagcttgtcctcccgtaacaataactattagcgtaacataatacttttaaattggaataattaattttagatttctaaacaatatatataaagttattacaatttactttttaagtaatttattcataaaaaaatatctctattggattctttatatctaatagttttatcatcttatcgatttcattagatccaaatatacctttattaagtttattacctaaagtttttggagacattcctaattcccttgccagcttttcctgagtatatccctttgctctcatctttccttttaactcattaattaatatcataaatgctcccctttcgttacttgttaagtaatattttatatattatggctattattgtcaatacctctcacgtaattttttctatataatggaaaataattgttgcatatccggaaacagatgttataataaattaaaatatataaattttggactgttttccaatacattaatattgtataaatgctataatatattttatctacactgtcttaa

SEQ ID NO: 183 - DNA, 5275 bp, Clostridium beijerinckii
gaataacatattattgtctaaaaaataattataaacacttatcaattattactataatattgatttgcgcatttgttataagattgttatggttctataacattgatagtattcctataagcgactttaatagaatgtttatatgtgcagaagattttgcacatggatctacttatatgtttagagattatagctattttgctagatttccacatatgagcatgacagttatatatttttctttaatcataagagttttttcaaatccattagtagctataagatttataaatgttattttctctatgttaaacataatattattattttttatatcaaaagagatttttaaagacaaaacaaaaagcatttgggtactacttttaagttcaatttacccacctatgattacttataataatgtttattgctcagagaatctggccataccattattgttactaagtgtattaatgttttttaaagcaattaatggatatattaaaaataaacttctattttttttaatatcaggcttatatttaagtgctatgcagctttttaggccccttgggtatataatgattgttgcttatacaatgtatatttttctatatttcaaagaaaaaattaaactaaaaataattaaaagcttattaattattttaatgtttataatcccttatgtaattgtaagctacacattaataggcctaaatattacagagaatcctctttggagtcctatggagccaataagtacatcagtactaaaaggtacaaatatttattcaggcggaggctggaatgaagaagattttaatttaatagataaatatagtgaagattattctaatttagataaagcggcaaaagaagtcataactcaaagattaattacaacacctaaaatagaattattatgtttttttgtttttaaatatgctaaacaatggtgtataggagactttggtggtgtttattggtcacaattaggacttaatgaagcttataataaagaacattatttagacataatgggcaaaaatgaaggtagagatttaataaagctaagtaatgatatgcaaatttatacacagctattttatattacaattttaatacttacttatattggcctatataagaacaaaaaaaatgtgaattataaaattgatttcttttatattatgttttgtggtcttgccattcaatgtttactcacagaagctcaagacagatatagctatcctttttcatggatttttataatattagcaattacagcctttaataacaatactgtaaacagtaatggaggaaaaaatgaataattttaaatatagtataaaattattgcgccctaagcaatgggttaagaacttatttgtctttggtccaataattttttcgaacaatttaatgaatcttgaattattaaaaagaaattttattacatttatatctttttgctgcatatcatccgctatttatatacttaatgatattgtggatagagaaagcgataaaaaacatcctattaaatgcaacagacctattgcaagtggtaaaatcagtctacttcaagcttcaatagtaggaatcctgttatgtttaatatcattaagtttagcaattattcaagataaatttatatttattataatatgtttatatgtaataaataatctagcttactcttttaagcttaagaatattttcttaattgatatattatcaatatcactaggatttattttaagagtactatcaggtggaatttcaacgacagttcaagtttccagatggataattctatgtacattatttttatccctatttctaggatttggtaaaaggcgaaatgaaataattgttttgggtgaaaatgctagctcccatagacaaaatttatctcaatatactgaaaatttactggataaatttataactataacattgacatgtactattatgtcctattctatctattgtatattaggttcatataatgataactttatatggacaagtatttttatcatttttggagttttaagatattactacttaatgtattccaaagaagtaggtggaaatccggctgaaatagtattaaaagataagcaactttttaattgtatattattatggggattcacttgtattgccattttaagcatataggaggtattagaattaatgaaaattccttttgcaatttttgatgttgatcatacccttataaatggggattctatgtttttaatgttgttttttgctattagcaaaaaagtaagactcatattctatacccctatgatttttctaaaaatattattgtgtctttttaaaattatagatataaaaaatgttaaagaatccatatatgcacctataaaatatttaaatgaaaaacaattagaagagttttatgataaggtactattaaaaaaaattaatgaaaaagttatgagcaaattaaactttcataaggatcagggatgccatattctactagtttcagcttctccagaaatgtatttacactattttttaaaaaatagttctattgatactataataggaactaagcttaagatgttggatgggaaatgtactaataagattcatggcaaaaattgcaagggtattgaaaaggttcatcggataaaacaatatttaaatgaaaataatttagaaattgatttcgacaattcatttgcttattcagattctttgtcagataagcctatgctatctttggttaagaataggtataaggttaacaagaacggattagaaattgaggagttcatatgaaaattagaattggtattatgttcatattaatatcagcgtttttaactgctacaggtcagttattatggaaaataggcataaataatattaagtttttacctctaggctttttattttatggatttggttcgatctttatgattaagtcctttgaaaaagaaaagcttgtagtagtatatcctattatgtgcatatcatatgtgatatctatgttctacggcaatctttttctaaatgaaaccataacacctaacaaagttttagcagttattttaataattttaggagtgtcttttaatagttatgataaatagtataaaatttttacttataataagcatgacattgtgtggagctttaggagggacattttttaaaaaatcatcttcaaaaagtaacaaaataaatggttatttaattcttgggatgtgtctttatggaatgggctcaatattaaacataatacttttaaagtatattcagttaacaattctccttccttgtaatgctattacatatatttggacagctttaatagctaaatatatatttaatgaaaatataatttactgggaatatcatttattggattagggttatgctttttatatatcaattgaatttttacaatatgtatttttaacaacacctttatagaagtaacttatacataaataaaaggagtgagagaacatatgaaaagaactataaaattctatgttttttgttttttaggaatatttctatctatatttataatttatgctataattaacctcagaaaaaatataattataataaacaaaaccatatactcaagttcatttccaaagagtaattttaaaagcacatataattctaagattaacttctcagatacacctgtggcagaaattaatggagtaaacttaaatattttaagcgaaactaacattgctaatgttcctatgctacttaaatcccaacgatactatataccacttagttttatttgtgataaacttagctataccctttatgtttcagttaacgaaattttattatacggcaataataataaaatttcgttaactaaagattgttattataaaaattctaattcaggttctcttcgtggtaatttaataaaatataatggcacttattatatttcaatatcagatatagaacaactatttgatttagttgcagtatttgactttaaaaataatagtattagcttaattaatagtaatgtcaaagctccagaagaaccttacatattatacagtgataagattgccttaatgagatgggaagactttgcttgtggtggttcaaattttactgacacaaatcaaacaaaaataaaatgtatggctgatcttttatattctaaaggagtaaaatttcatgttagttggattcctagatttaaatctcctgaagataatattgataatgatttattaaaaaataataatatagtaaatgtaggctttgttaatcttttagattatttaattaatagaggcgctaaaataggacttcatggttatacccatcaacatggtaatgaagaaagtggtactggtgaagaaatgtctaaggatgtaaataatacaattcctgaaactcgaagcattgttgaaaacgggattgatactgcaagtgctttaaacattcctatatcatatttcgaaagtcctcattatcaaaaaacccaacttcaacgaaaggttattgaggattattttcagtatatatatgaatcttttgatggatcacaaagcaacatatataaatctgatgactatcacttatttgtaccaacccctttaggatatgtgcatgattcaaatccttcatctataattgatggactcaataattataacccttatatacttcatagcttttactatcatccatttgttgaattaaaatatataaattttgatactactaataataagctaaatgtgacctatgatgaaaactcaccattgcagcaaatagttagaacacttaaaactgataaatatacaatggttcatatcgatgaacttataaataaatgattgaataatacaaatattatgactgtactattcaattacatacatgcgaggttaaaatgataaattcagtagcaacgtttttaacagaatacttaggtaaaaataataattctttaaccgaaaaggatcttctaaaaattcaatattcactacaagtaattctaggggatttaagtaagtcagtaataatattatcaatcttcttatctctaaagcaattacctttctttttcttgatttttgttattctaaactcaacaagaatttttatgggaggtattcattgcaaaacatttaattcgtgcttaatttgcagtataatatatttcttaataatattattattcagcatattatcgcctaaattaaatatatatttttacattatattt

SEQ ID NO: 184 - DNA, 5208 bp, Clostridium beijerinckii
tctttatagtaataaaggtttggtaaatgttaataattaataaatttaatacaaatttcttctgaaatggattgaaaatttaatatattttagtaacaatacagtaataaaagttatgattagttaatatatataatgtgaaagagaattaagtaaaataactttttataaaactatataatatcaagtgaaacttgattcaggtggggaatacccggctaaatcgtagtttaacttatctgggtctacccacagtttccacccgcttaaaaagtgagtgacaaatgtgactagacatcagataaattatgttgttattgttagttaagaatattcatatattaagattttgtttttagaatgtcgagattcatatttagtagatgccaggggaggataagatgaaaattaggtgtaaatttgcgttaatagtagctttactattttttatgacaatgatgagtaatgaattgccagcttttgcagaacctgaactatcactcgaacaagctatacaaaacattcaagaatgtgatagcaaaattgataataatatagacaagctaaataagattaaagaagaagtttctcaaaaggaaaagcaaataaaggataatgaagaacaattaaagatagctaaggaagatgtagaagagaaagataagaaattagccgatagattaaaaggtatacagttaaatggaggtgttgaatcaacaacgcttcaatacttagatgctttaatttcttcgggaaatgttttagaagcaatgaataaggcatcattaatatataaaatatgtgaaaatgataaaaatatgattttacaagcaaaagagtccgaaaaaaggataatagaagtaaatgaagagatagaaaaaggaaaagctgatttgcaaaaaaatgaaaacgatattagaaatcaagttgtagaattagaggatcaaaaagataaactattaaaatatattaaagataataatatattattgagcaggaatacaggcataactgttccggttacattatcatctgatattactggtcagaaaaggtctctaatagaagaagctgaaaaatatttgaaagttccttatttatggggaggagagtcaccatcaggctttgattgctcgggtttgattcaatatgtatttaagtcgcaagggatatatatacctagaatatcacaggaccagcagcgttttgcgaaaacaattagcatatctgaaattaaaccaggagatttggtatttaataaaccatcagaatctacacacgtagggatgtatataggggatgatatgtatattcaagcgcctcgaactggagatgttgttaaaataagcagattaagtaggtccaatatgaaatatgttggaagagtattagattagagtcatattaaaaattacagcacataaggtacttaaaatattaatagcggccttatgtactgatattaaaaatatttaatcatatatatcagaaaactctatttttattctttgaatattactttcttttgctaaatcctcatctgaagtaacattttcgctttctggcaaaactttaacgggaagctctattataaactcactgcctttgccatattcactattgattttaattgtaccattgtgaagttcaacaagggattttacgagagaaagtcctatgccacttccttctctttttcgcgaaagtgatttatctacttgaacaaatctcttgaaaatggataattgtttatctttagggattccaacaccagtatctcttacagagactataatgcttgaatctttatctagtatatttacaaatatgcttcctccagaagaagtaaattttatggcatttgaaagaagattaagcattattctttcgattttatccgcatcgcaagccattagcttttcttcaatgtttgtatcaaaaataatgtctaaacctttgtttttagcataatcagttacagataaagttatatcttctatagtggatatgatattttcattttttaagctgagtttaaagtattcagcatcaattttagtaatatctattaaattatttactagccttaataacctatagcagttttgtttcataatattatagtatttgcttattttgtctttactatctgtattagttttgtttgctccaattaaatttagaagttgcagtgtgctaagcattacgtttagtggggttctaaattcatgagataaatttgcaaaaaattctgttttaagtttatcatattctgcagctttatctaataaccgactttgctcttgtatttttaatctaagattttcagattttttatgttccgaaatatctcggataacacttaatatacatgggttaccttcatattcaatagctccagagtatatatttactggaataatatttccatcgaattgaatcattttttcttcgattataggtactgatatattatgcttaagcactttttcaaatctattaagtataatatcgcgataatccttatgaacaatgccaatttcaaataagtctctacctagaatacttttaaaattgttaatgtttagtagtttttccacgcctttattcacaaaaagtattttataatttgtgtctaaaataaaaactccctcataaatactgtctaatatgtataagagttgcccctttttcttttcaattaacttataagtgtcttttagttttttatatttctcttctctgagaatttttatattactaatttttttcttgttttttaattcgagcttccaatcaagcataatcttttcaataaacatatgaaaaaaatctaaaccgacaaaaaaagaatcgtaaggtaaatttaagttgttagctagtatttgaatttcttttgtgctgtcctcataaattcctgtatctaataggagaagcttattgggttttttatctaaaataaatgaggtattatctttatccatgtttttaagccagcctgatgttataacatatgaatttgtatctaaaagattattaactacatctttattaataaataagttaagacagtgttccattttatatagtgtgcatttttctttgttattaataaaatcttctaagttagagctgcaacaattattttcaataataacaaaaattttattacacattttttcacataaattaatagcctctattaaacagtgattttttgtgtttgttgcttttgaacatgtggatgtaaatggtataatcataacattttttatattataagtctttactgcaaattcaatctcttcaataaaattttcacaaattactatacccaaattagttttcatgttatcctcccattttagctaagagattaatttacctcatagctgatttttactaatagatcatatattattcaatagcgattttgtaagtaaaagtgactattccatatgtttaaataattagctatgtatataggcttggctaagtatatataaatttataatttatcagaaatttgttttaacataaaaagttgattaaacaaatgcattaatattataccccttttttttctaaaattctataaaattacccatttttacagtttatttgatattataaaatgtagatagtatcttgtattaagagcaaggtgaatttaaaatgaagagataaaacaatgaaagatgatacaaatataatttttaatattataaagttactgttttgcatatactatgtttaacttagaagcaatatataaaataagctgataaaattggaggaaacaatgaatacaaaagagaattttttaagcaatgtgaaaagcggtgaaagcgtaaaaatatcactaatggtcatgaaaatattatttagagatcctgcaaaaatagtctgcatattggctgataaaagtggagaaacgaaggcaaatttacccaacaagaaagatgatattacagacggaatagttttagaagttgagggaattaaagatggaattctagatgcgaaaaaatatgaaattattacaagctatagcatttcagattatcttccaacagtaaataggcctgttgatgatattatgcaggaaatagagctttatacaagtacgtatataatttcaaaagaggctaaagccttgaacgattatttctttaaagacgaagagtttctagacaaatttaaaagaggtataggcggagtatcgatgcatcataattacataggaggacttgcagaacatacattaaatgttatgcatttaactttaatgctttgcgaaagatatggttgcagaagaacagaaattgccatacttgctgcaaaactgcatgacatagggaagatttatgagttatcttatgatggaccgtttaaatatactcttagaggtgaaatggaagggcatatcgttattggtgttgaaatgatagataaggcaatcatgaaaaattcttcatattatagtgaagattttatcatgagaataaaaggctgtgtagttcaacatcatggaaaacttgaatatggttcacctagagaaatgagaatggaagaatcttttataataaattatgcagattcaatagatgcaacaatgaataaaatttctcaaataaaagatagaatagagccaggaaactggtcagaatatgacagaagaattgaaactaaattatatttatagtttaagaaaagggacgcgattattatatgaatattttatttatgaaagtcacattaagagcatcgtgggttcactcattaaaagagaaaagaatgattgtaaaaagcgtaacacaaaaattaaaaaataagtttaacatatctgtatctgaggtttatgaacaagatgttcataaaacaatagttataggtattgtaggaatatgttctaattcagctcaatctgattctactatggagaaccttataacctttatagaaaataatacagatgcagaaataatagatatacaaagagaagatattagagtgtaaagatagagatacataaatataagtgtttgagggatgtgtcatagagcaataattttaaattctatcctgaattattcataaaattatatgaaacatgctttgcatggctcgttaagctgttcttaacaaattcaaaacttcacttattaagtgaaaaaatatagaaaaatagactcaaatttgttatgg

SEQ ID NO: 185 - DNA, 4809 bp, Clostridium beijerinckii
ggaatatattctttatttttaaaaatgaatttcttttagagacaaaattcattttttatgttataattcaaaatgttgctaagtaatcctaataatttgcaacaagaaatgataataacgtcatatttaatattatttttattcaaattttaaactaaggaaggataatttactatgaagaaaattaaatttggtctagcattacaaattcttgcaggacttatacttggaattatagtaggtggatttttttatggaaatccagctgttgaggcatatttaaagcctattggagatatttttattcgtctaataaaaatgattgtagttccaatcgtcttttcatcacttatagttggtattgctggagcgggagatattaagcaggttggaagacttggaggaaaaactcttctttactttgaagtagtaacaactattgctattgtattaggacttttaattgctaatgtatttcatccaggtacaggaataaatatgcaagagcttgctaaatctagcattgattcttatgtaagcactgcagaaaatgtagcacatcatagctttgcagacacatttataaatattgtacctactaatatttttgattcacttacaaaaggagacatgctttcagtcattttcttttctgttatgttcggtctaggagttgctgcaattggtgaaaaagggaaacctgttatacagttcgcccaaggaacggctgatgcaatgttttgggtaacaaatcaaataatgaagacagctccttttggagtattcgctttaattggtgtgacagtttctaagtttggactttcatctttaattccacttggaaaactaatagttacaacttatggttcaatgattttatttatattactaatatttggactaattgcaaaattagttgggacaagtatcttttcaatcataagaattttaaaagacgaacttatacttgcttatagcacagcaagctcagaaacagttttacctaaaatcatggagaaaatggagaaattcggatgtcctaaagctattgcaacttttgtagtaccaacaggttattcttttaatctagatggttctactctttaccaagctattgccgcaatatttattgcacaattatatggtattaatttatcaataccagctcaaattaatttaatgcttgtattgatgcttacttcaaaaggtatagcaggcgtgccaggagtatcttttgtagttttactagccactcttggttctgttggaattccagccgaaggcctagcttttatagctggaatagatcgtatacttgacatggctagaactgttgtaaatgtattaggtaattctctagcagttgttgttgtatcaaaatgggaaggaaagtataattctataaagggcaaagaatatataaaatccataaagaaagctgcttaattctataacaaaaaagtgagtgtttatctagaaattattttctaaattaacactcacttttatttttatattctattgtcctagattaattgttatctttatttctacttttaatataattattatagataagtttttactattacctacaacttatctataatctttttctgtatatatctaattacatcgcctctactaataactcctactactcttctttctttatctataaccggtatctttttaaagttatgttttgagaaaatagacaaaaccttttccatagtatcttctggaaaaacacagaaaatatctttacattttgcaatagtcatgatattagtatcctttatcattccaatttcttcttctaattcttcctttttaagataaaatacatatgaaattaaatcatacatttttccttctttaggatttatgcttcttattatatcaccatcacttacaatacccgaaagtattcccttgttatctactattggtactccgcctattttattggtgactaataccctcatgacatctttaatagtattttctttacttacggaaattacatcagtaatcataaaatcctttactttcattattctatcccctttaatcaatttactttataagtattttcttatttgtctatcaaattcattagtaaaattttatattatttttatattaatatctttttaatttatatatatctattattaaataacacattcctctattatagtttaattttttatatcatcttctagttctcataaataatgttaaaaatatagcaataacagctatagctccagttacagaaatagaatatgccatagcatctacagatgcttgtccttgaataatttttgccaattgagatagtgccataactttagaagtttcttgtgaaaaaccttcatacatatatgattttgttagtgaatttatagttcctactgctgttttattgtagatatttatttgctctgcaagttttgaataattataacttgttttcgattgtattattactgtcattatggttacagcaagagaacttgccacctgtcttatagtgctattcaatgctgatgctcttggaatcatttcgccttttactacattcataccagcagtgctaataggcatcatagctattcctaatccaatagatcttatacagttaataaatattattgattccttgctagaattcatgcttatagctgttgacaacttaaatgtagctagtgctaatataataagacctggtataactacaggtttagctccgaatttatcataaagcgttccgcttaatggcatcaaagcccccataactagtgctgatggaaacatgataagtcccgcctgcatcgcagtatatccccttacattctgcagaaataaaggcaatacatatgaccctcccattaatcctatagttaacacagttattataactaagctcatactaaaatcaaatagtttgagaactctcagatctaatagtgggtctggatgtgtaagttcattaaccacaaataatatgaggcttaaactccccaacgctactaacattggatttatcatatcaccccaatcaattgaggatccttttccaagtacatataacaaacttaccaaacctactgtagatgataaaaatcctactatatcaaatgccttaaatggtttcataggttggccttttaaaataatcatccccaacaatactcctattattcctattgggatatttactgtaaaaattagtctccaatccattttttctataatcagtccaccaagagttggtcctatagcaggtgcggccatagctgctattccataaactccaagtgcaagtcctatcttttttcttggaaatacagaatatattatactcatgccaacaggctgcatcatccctcctccaatagcttgaaatacacgaaatgctatcatactagaattgctccatgcaaatccgcataacgcagaccctattgtaaaaatcgccaatgcaactatatatacttttttagcgccaaaaatatcttgaagatatcctgttaaaggaataattgctccaagtgctaatgtataagctgtcattacccacttcacatcatccaatcctacgccaaatacagacatcattttagttaatgcaacattaattatactactgcttagtactgacataaatgtaccaactatgataactatcattgctaaccatggattggcctgctcattactattatccttcattctttactcaccccattatttaacatattactaggcattaaataagctaaaacatttacatactactgcttctaagttacttaagctttcttatacgtctcttctcattaatttatgactttttatcatatctgcgattttcaaaatataagttacactacgaaacttatttaagtataagttacaccgcgtaacttgtcaatgaattttgagtaacatttagtaacttgtaagtttatgattcatttgctatgatgtaattgtcaattagtgaggaggtaaagaaatggaatttcaacgcgctcgaaacgaagaacaaaaaagcattaggcgtgaacaaatcatagaggctacattaaagctatatgaaagagagcccttagaaaaaatcacacttgcttcaattgctaatgagttaaatttttcaagagcaaatttatataaatacgtttccactaaggaagagattttcctatggatattaagttcagatttagaaaaatgggtaaaaaagacatatgataaacttagagattatgatcaattagaacttaaaacattttgtctgttatggtcagaacaaatgtatgaaaatcagcgttttttaaagctgttctcaattttagtttcagtattaagaagtaatgtgacaacaaaatcactggagatattgaagcaagatcttgctaatagctttggtaaattaaatttgattactaaaaaatttattcctaacctgacagacgatgagcttaaactttttaatgaatatcagatttattatgccgctagtttatattctccagcagtatcctctaaaaaccaacgtcaagaatttcaaactgtttcactactagaagccccacctgattttgtttcgcgttttgcaggatatcttgaagtaattatattgggtcttcaatcgaaaaataaataatatttaggggctgctccaaattggcttaagtgtttggaatagtattatgtatgatattttatggaatactaagtgcatagatattttaaatatagggtaaaaacccttgcacttaggagtgaatttatatg

SEQ ID NO: 186 - DNA, 4726 bp, Clostridium beijerinckii
attatttataggaataatccaccttaataaaatcacattgatttattctcttacttttactctttatttttttaaatattaagttttttaactgccaactccgccatttctcttaccttctcattttcttcattaatatacaaacaaaatactatcctcaacctaaatttcaactttaacatgtatatacatatatttaaaataatatagtttattaataatagatttaggttactattacttgttttcaactatatctataaagctattaatttcgaattaattgacatgcatatgaatttaaattagggacttttttatcattaaacaaactatttctataaatgataagacgtaaaataatatatgggctacaactaagtcataaatatgaattaaatcattacttatgtactttatttggaagagttattaataaaattttgtatttgcgctaacgtttttaagaattcttcaaatttctcagcgcctatctccttctctattggtgattgtacttcattccatacaggaattgcctcatcgagcttcttaattccgacatcacttattgaaatgcactttcttcttgaatcattatcatctgttcgcacatctacatatcccttttttcttaaaatttcaatattgcgagttactgttgtctgatccattagcaaagcctctgccaactcacttacagcaacattttcacgagatgctatgtctgctaataatgaaaactgtggtgctgttaatccaaccgcttgaaaaacttgatcaaaatactgagtagtgacccttgttgtcatacgcaaatttctacaaacacaacttccaattttctttaaatcatctaaattagacataaataaattacctccgtcaaaacctctgaatatacatatagtaatctatagcaattcttattgtcaatatactcacaagcagatttcaaaaaactagctttattgaagaatatattatttttatctcataatatcattaatttttaagtttaagatattatttcctgttaaaaacacagattgttttgccaaatcctgaacacttaccgcatgatatacattttgatggctcagtattaccttcgctccaacgattaataagattactttcacatactaatggtctggacaatgcaaaataatcaatggagctttcattaagaatttttgttagggctgaaatgtcacgtattccgcctacagaaataactggaatatcaacttcttcctttatactttcagcataaaatgtatagtaaggagcttgtcctttcactatttttcttgaataactctcatttgggcgtgaagataaactccccccactaatttcaacagcatctacgccaagctcttcaagttttttgcatacatatttacattcttcaaaagtcatgccttgatccataaaatcttcgcaatttattttaactaaaactggataatcttttcctactttatcacgtatttttttatacgtttctataagcattctagatctattatcaatactaccaccatactcatctattcttctattataataaggtgttaagaacttactaagtaaatatccatgagctgcatgtatctgaatgccatcataccctgctttttttgctctaagcgctgcatttgcaaaatctatctgaattgaaacaatttcttccaaagtcatttctttaggagtatttttatatcccaaatctgttatattacttgggcctaaaattgccttttcttcatttctaatagtttgtgtgcctgctgctccaagttgcaatattatattggtattgtgtttatgagttacttcaataatttttttatgattatcaataaatgaatcattataaattcccatttggcctggaataaattcctctaaatcagtcacagatgttattccagtaattatagttcctacacctcctttagctaaatcttcgtaaactttaaatagttcatcatttatatttcctttttcatctgccattccttcatatgttgcagatcttataaatctgttctttaatttaagtggaccaacttgcgtttgatcgaataatgatttcataattaaccaactccattctaaatatatgcatatacatatatttcattaaaattttttattcaataaaaataaatttattaaaacagatattatatgtatatgtatatgcatataatatcataatcgttaattaatcgtcaatcaactaaaaattgttataccttattttaattaagaccttatattttattcgagctaataaaaatttcatttattttaatatactttattaaaataatcaacgaaaattattcaatagaaacactacatttgagtatatattcctttttaaaaatgtatgaaattgaaccgctacttaatttcaatatataataaatttaattaaaataatatctaaaaatgcctgtcataattaaacacagtaatatttagtaatatttcacatattttataggtacatgatttgatttaacaatgaaacatcacatttattatcatattatatatttttttcttaaaacccaaaaatagtagtagaaattctcctactactgcttaacatatcatcaatgctaatttgtattttttaccaattaatgttataattattatgccatctcaaatcgatatattatggaggcgtagcatatgaaacgtgcacatgtaaaaaagcgtttcgataaggatttaatgaaaaatatatttctttttcttagtgagctactcaatctaatctctataattttaaaactcttcaaataacaatagcacaaatatatacttgaaacattatttatatttttaggactagtataattatattgcttaaaaaacgtaagtaccaattacgcgagatggtaagttattataattgaacgtccttttttattctttaaataattataattcgaataaattcatgaatgatttatacaaaagatcattcaagtgaatttaaaaataacccaaagaatttttattttatctatcacaacacaagcataattatatcacttttgggatttaatgtaaatataattttatatattttagaccgactcattctaaaagtatactttagtcttatgagtccaatgcaagattacatcccaaccgataaggacttagaaagaggattcttaggtcttcctaaaatccctggaatccactaataaatcaaatattattccttctctcaataaaactgagagaaggaacccttttaatcatctttagtcttctaaaaacttttgttttctctcatcttttctatctataacaatatcatcaattttaacgttatttgctcttaatctttgaataatatcctttataaatgcgtcacttccaactaaataatacatagcatcctctgatttcattgattggctaagtatttcataaaattctttcctagaatttatccaaaaattcttataattttcatctgctaatctatccagttgatttttaaatacaaatttatctgatgagtctatatttatatttgataagtatgagatattagttttatcattaataaatgataaaataagaggtctcatagtagctattccaactcccattgatattaagattataggtttatttatacgtcttaaccccattcttgaacctatcttaaaaaatacaacttcatcaccaatttttaattcagatagcttattcttgaattcagatttgctccctggcactcttgttgttatggcaattttattttcctctggtaaagttgtaatggacatgtgtcttacccattcttttctaggctgatcaccaatatcaaacccaatatgcccaatatgggtatgtgagccaggttcccatgttaaattttctggtttttcaaaaaaatatgtttttgtattatctgtttcatcaattatatcaataatttttagtgtatatttttccataatccctctcctttaataacaattctcaatttaatagtatcaactaaaatttttcaagtcaatgtttataaatttcaattatagataatccaactaaaacctgaacttatgcatataactcgccgaaatgaataacatacttttgttccagtttctagttgagatatatttcatagtataaatctaacttataattggcttatctatatacagatttcccaagcaagaataataacttttagttttcatttataatatgttttattatattcattaatgatgatgtcattaatgtcttatcacgaaaaatgatatatattacaaaaataatccttcattataactctaaaaaaatttcaaaaattttatccgcaattttgaaatgtgtactgtgaattgcaatatatatactttataaaaaaatcccaggcgactgtggagccgtagattttttttacgcatctgcctttccgaacgcatgtgaggaaaatctggcaggcgaataagatttcttttttattctttttctatacaaaaactaattaaatagccttcttcataagttatccacagattctattacattataaattcccatatgtgttgattaaccaaaaaatagaagtgaaaatatataaaaaatgaggtcattctgtagtaatattaaagtgcgaaccaaaataatacttaaggagaatgccctcatgaaaaatactaccact

SEQ ID NO: 187 - DNA, 4665 bp, Clostridium beijerinckii
attgctgtaaataaagatgattcagctccaataatgaaaattgctgactatgcaatagttggtgatcttactaaagtagtaccagaattaatagctcaagttaaagaaataaagagcgctgaataattattcggttaatttagatatgtttttgttagattgtactattgaaagttaataatgtaacattaaagataattaattaacaatattattcaataagtaacaattagataattatgaagttaatccttagttaaaatatatattttagctaaggatatctataatgaaaagatttagaggaggaataatttatgaaaaagatttttgtacttggagcaggaacaatgggtgctggtatcgttcaagcattcgctcaaaaaggttgtgaagtaattgtaagagacataaaggaagaatttgttgacagaggaatagctggaatcactaaaggattagaaaagcaagttgctaaaggaaaaatgtctgaagaagataaagaagctatactttcaagaatttcaggaacaactgatatgaaattagctgctgactgtgatttagtagttgaagctgcaatcgaaaacatgaaaattaagaaggaaatcttcgctgaattagatggaatttgtaagccagaagcgattttagcttcaaacacttcatctttatcaattactgaagttgcttcagctacaaagagacctgataaagttatcggaatgcatttctttaatccagctccagtaatgaagcttgttgaaattattaaaggaatagctacttctcaagaaacttttgatgctgttaaggaattatcagttgctattggaaaagaaccagtagaagttgcagaagctccaggattcgttgtaaacagaatattaatcccaatgattaacgaagcttcatttatcctacaagaaggaatagcttcagttgaagatattgatacagctatgaaatatggtgctaaccatccaatgggacctttagctttaggagatcttattggattagacgtttgcttagctatcatggatgttttattcactgaaacaggtgataacaagtacagagctagtagcatattaagaaaatatgttagagctggatggcttggaagaaaatcaggaaaaggattctatgattattctaaataatatcatgaatatatggaaaaactcaagtttatgcttgggtttttttatttttagggaaatatataaataactactagattacataaataagtttaaactaaagaatattgtaaaattcaacaaaacattttattactgttaagtaagtgatataatatattaaataataactattttcttaagattaattgtataatttaattgaatattggatattaaaaaaataaatagttaaaaaatatgatataggtggtacacatcagaaaatgggcaatataaactgtgacataatctttagaaaaaaactttagtgtagaatatattatttaaagaagaatatatgaatgaaataagttaaaactaaggttgatatgatattatgtttatcaatgattttactaaaaagataaaaatatattttgaatattcataatcaaagagtagggttcatcaatatgcatattagattatgagatgatgcaaactaaataattttatactgtaagggagacggataataaaatggattataaatctgtagaattttatgataattatttaataataaaagaattaagaaattttaaattaaaacatatatttgagtgcggacaaatttttaggtttgaagaggtagcagaaaatgattttattgtaattgcgtttggaagattaattgaagttaaagaagagggaaatgacgtaataatttataattctacaaaggaagattttcaaaatatttggcttaagtattttgatttagatagagattactcagttataaaagatgaactttcaaaagatgttttgcttaaacaaagtattgaatttggatatggtgttagagtcttgaatcaagacccatttgaaatgttgcttagctttattatttcagctcgaaataatataccatcaataaagaagactgtaaataaaatatctaataaatggggaaaagaaattatttataaggataaaacttactatgcgtttcccaatatagatgaaataaaagatgctacattagaagaaatacaggagacaggagcatctttcagaagtaaatacatatttgatacaataaaaaatgtgtataattctaagagtggaaaagggaacttaaaaacaaatgatgcaaatgaatatataaagtatgatctggattatattaaaaatttagatgatgatgaatgtcataatgcacttcaagaatttaaaggtgttggttcaaaggtagctgactgtataatgttattttcaatggaaaagacttcagcatttccagtagatgtatgggttaaacgtgcgatgattcatttttatggggcagaggatgcatctctaaataagattagaatttttggaaggaacaagtttggtaaattagcaggttttgcacagcaatatttattttattatgcgagggaaaataagataaatgtatagagtggattaaaaaggttaatatataatgaaaagtctaggattttatttcctagactttttatttcgtcaaaaatgtcagattaatatattcaataatgttaataatttatcattgatgcaataatataaatataatataaatcccttgatataactaatataaggtaaataaacatattcgaaaagaagtggaaatacaagaaaaaattttaactaaactagttaagaaatatcactatatacatatgaaaatagaacgtatattaagaaaatttagaaaatttaaattatataatatttgttataattttaacaagagtatgctataattattttgtattataaatgtaagataaaaattattcatgggagagtgtgtgtaatgtttcagtttgagaatcaacttctagctttaaaacacgaggttcttactagagttgctgtattagcaaaagaaaataatattagtaaagaggaaatagaaaaaattccttatgctatgattgtaggagaagaacctaagtatagagattcagttgaacgagaaagaaatgtagtattagagagagcaaaacttgcagcaggatttaaaccaacaggcaaacatggacaagatttagttgatatagaagaagaaaaacaaatattatatgttataaaagaagcatgtgatagatgcccaacaaagaagtttcaagttactgatgcatgtagaaattgtatagctcataagtgtcaaagtgcgtgtaattttggagcaattacatatgttgatggaagagcttatatagatccagataaatgtaaggaatgtggaatgtgtaaaaaggcatgtccgtatgatgcggttgcagaagacatgagaccttgtaagaagtcatgtccaacaggtgcattaagctataatgcagaagatttgagtgctgaaattacagaaagtaaatgtgtaaactgtggtgcatgcatgtcagcatgtccatttggagctatagaagacaaaagctcattagttaaagttattaatagattgatggataaagaagaaaaaatttatgctgtagttgcaccagcaataacagggcaatttgggcctaaaacaacttatggacaagttaagaatgcaattaaggcattaggctttgaagatatggtagaagctgcatgtggagcagatgcagttactgtacatgaaagtaatgagtttgttgagagaatggaaaatggggatagctacatgacaaattcatgttgtccaggattcctaagctatattgaaaaaatgatgccagatcaagctaataaaatttcagggacagtttcaccgatggtagcaacgggtagatatataaaatctaaagataaagatgcaaaagtgatatttatagggccttgcacagctaaaaaaagcgaggttctgatagaatcaataaaagatgctatagattatgcattaacgtttgaagaattagtagccttatttgatgcgtttggagttgatcctacaacttgtgaagatatagtagttgatggagcttcaatatttggtagaaattttgctgtaggtggtggattaactgctgctatagagaactatgtgcaagaaaaaggtgttaatattgactttaagccagtaaagatctcaggcggagtagaaattaaaaagactatgacaatggctaaggttggaaagttacaaggaaactttattgaaggaatgatgtgcgaaggtggctgtataaatggggcagctaaaattgtatcagtaatgaaggctaaagcgccatttacaaaattaaatcagcaaacaagtactaagagtgtattagctaatacgacattagacgaatacaatgaaataaacttagaaagataatatgaatcttgattttgaaatataattaagtaattaaaaattctattattatataggtgctctaggcaatgaggtatttagaatttaaaattatttatgaaatttaagagctttattctctatataatgtcataaaaactctaatcagtaatatgtttatttggttagagttttttt

SEQ ID NO: 188 - DNA, 4475 bp, Clostridium beijerinckii
atataataatatatgttaatgttttcactttgaatttagtaggagtgattcggtatgaataaaattaaaaaagcttttaataaagataaacaatccttcataagtaaatcattcaaattaaacgaaaaattcaaaaactattctataagtaaaaaaatagatacaacctttaattttatacttatatttacattattgagtatggttatatctataggtgtactactatcattatctgctagaactttttctctatataatggtccttatcatatttctcaagcattatccgatattaggcttgcatttcaggtttctgatacaaatatttctagagctgtaatagaaaatagtcctaaaaataaggaagactttataagaaattccgatgaagcccttgaagagctcactagtaagatagatttattgaagcaaaatacaagtgataaatctgccatagatcaacttactaaaaatttaagtattgctgatacctatagaaaagaactatgcaattctatcaaaaataatgatcctaaaagtacaataacttctaagttggatacatatagctttcaaatagatattgtcgaaaattatatttctcaattatacgaatcttctaaaggaaatgcacaaacatttgtaaatgaatccattttttacaggaatttggctaccgtaattcttgttttaataattatatttttaatactcattccaagatttctaggtaaaactttaaaatcttctatatttgaaggaataaataatgtaaaaaaagtttctacaaatttatcaaatggaatattaaacatagacaatgaatattcttcaaaagatgaaatgggtgatatgttcaatgatttgaagaaatctatagatatgctaaaattatatattaaagatataacatatacattagaggaattatcaaatagaaatttaaatattaacaaaatggaatccgttcattacattggggattttgcgccaatacaaaaatctttagatgaaattatagctaacttaaattctagctttttagatatagataaatcaattgattttactgcaaatagcgcgaaagaaatttcttcaattacaaaagtactttccgaaggagcttctaatcaagctagcgcagtgcaagaacttcagggaaactttaatataatacttgatcaagtaaaaaagaatacaaataactctgaaaaagcttataattattacaatgaaacaacaaagattgttgctgatggaaataataaaatgaaacaattaatggaatctataaacgagattgctactgcctccaatgaaatttcagcaattataaatacaattcagtcaatatctgaacaaactaacttattagctttaaatgcagctatagaagctgccagagcaggcgatgccggaaaggggttcgccgttgttgctgatgaggtacgaaaattagctgaacaatcttctaattctgttaaaaatattactcaaataataaagaactcattaaacactgtatctaaaggcgaattgatagcaaatgaaactggtatagccttaaatagcattgtcgaaaatgttgaatatacttcagagttagtaaaggaaatagctactgcttctgaagagcaaacaagtgcaatatcaaaaatgactttaaaagtggatattatatcagatattgtccaaactaacctagcaacagcagaggaaacatcagcatctattgaagaattagcatctcactcgcaaattatgcatgagcaaatttctgaattcaaattacaacattgatataaataagcctccatataaatagtctttgaaaataactattttatatagaggctatttattatagaaaaagtaataataatttatctttaattaaattacgactactaatttttaaaaatgttcttgatttaatttatatcaaatttcaattttatgcattttttgctgcctgttcatttttaaagtttaaagcatcttgtttcttaaagaatgggtagtaaataacaaatgatactcccataattactaattgcaataacgccattttccatccacctaagataagtcctgctattattggtggtgttgtccatggaactaatactccagtaaataatggaactaaccctgtatacattgcaaaataagtaattaaccctgtaaccattggagtaagtataaatggtattgccataaatggattcattactattggagttccaaatgaaactggttcatttatattgaaaaatcctggtactatagctaatttacctagttctttactttgtgctgattttgcaaacaataacatacatattacaagtcctattgttacacctgaacctgtcataccaatcatattgtctaaaaattgttgtgttactatatgaccaccattagctactgtaagtgcttttccactattaactatagcttgattttccattgcatttgatgttagtattcctgtcattataccacttataattgatgatccatgtactccaaaccaccataaaaatgggattataaatgtcataacaataactccgcctagagaatctgtcattccttgtaatggtgtttgtattaacttatatattagttctataaatgttgtattcattccatatttaagaatactataaagtattgttgctccaagcactataactgctgctggtattaatgatgcaaatgagtttgcaaccccttgtggtacaccagctggcattttaattgtaatcttccttttcatgaaccatgagtaaattgcacctacaactaaaccaataataattgctgtaaccattccttttccaccagcaaattctttactaataacatcgcttactttttctcctcccttagttatcacataagaattagttgttaataaaaatactacaaatgatattattcctgcagatagaggttcatgtccctcgtttttcgcataggtatatgctatacctattgccgcaataaatgcaattattgagaatgtagctccataagcttgaaataatggctctgtccatcctggtccaagctgactagccatccaatcgttaaatggctgatatggtatttgtgcaagtaataaaaatactgatcctaccataataaaaggtaatgtaaataaaataccatcttttaatgctataacaccttttaggttaacaaacttcataactactggtataaccttttcatttagggtatttccaattgacataatgattcctccttaattaaatataatatgatagtcagaatatataataataaatatgttaggcttaatattatcttttatattaaagttacaaccttccatatagcctgctaatatcttaaatgattatatataactttgtacaataattcagttttatattacatttttctatataaattcagttcttatttattagctaaatttagtgcaaattctagcacttttgctccattcatcattccataatcaaccattggtattacatccactggaattccaagtggttcacacatcttttttgcttttcctaatgtatatccaacttgtggccctaatagtgcaacgtttacattatctagatgtttatccatttgtccttctggaaaagcttctatatctacttctacacctttgaccttagctgcatccttcattttactaactaaaagacttgttgacattcctgctgcgcaaaataatctaattttcatcatagttgattcctccttaaatatatatagtttattaaaataagaattatagttgttgattaattaaatttatatctcttttattgttttactaatgtatttataattttccttaattccattatttgttcaattaaattcttttcagttattgctgtcattaaatgatcttgtgcatgtacaaataaaaccgatatatcaactttttctccattagcttctttatgaagaaacattgtctgaccttcatgagctttagctaatgcatcatttgctaattgcatttctttttcagcttcctcataatttccttcgtttacattattaagagccatataagcatgatttttgcagtctccagcgtttattataatattcatgattgctaattctaattcttccattttgctctctccttttaatactttttgtttttatactttatattaattttgttttgtttttcttatgcttatatataaagcaataaccgtgccaagtttctgatgcagaaataaaaatgtgattatgagttcaatcgtagcatttatgcacttttgaggataataaaacactttaaaaacaattattatgtgttttactttttcacaaattttttaaaacaaatggtcaatgtgttttattttgtgtatttattatatgttttatacccaattttttagatattatagattcaagacaatattttgcac

SEQ ID NO: 189 - DNA, 4426 bp, Clostridium beijerinckii
tagtaaaatgaatattatgtaaattaattgattgttttccattatagggatataattaattgtatgataaaaaagacaaacttagtcgaatttaaatattattatctaagtttcatataccaaaggaactacaaataaagctaataccatactattcttggctaagttcaaagaaccaaatgtgataaatgaaattaagtcacttactcgacttaactaagttgtagcaagcaaaatcaatttcaaaggagactgaatctctgaggttgttagctaaatacgagtaaccgaatatagtaaaggaggttaagtcgctaagcaacttaactaagttctaaaaaccaaatatcaacttcaaaggaggctgacatcctgcggttgtcagctaagttcgagaaaccaaatgtaaaatttggactctcacttatcacttatcacttatcacttattaagtatttagttagggggaaaattatcaatgataaacaaaaaagttagtaaattattaggaccagtttttggaattatgggattcatgttaaccatgagtgcattagaaatgccagctttagcagctgataatgtacaagcaatttcttcttacacaagtagtacaacttcggctgctgctacttataaagattattcagttgatataaataagagcgttattcaaaatggattaaaagtaacattagtaaaggcaacggtaacaaagcataaattaaatgcagtaattaaagtagaaagcatacaaccttttgataaaactaaaaatgataattcgataattcaattactttatggtgaaactcaacgaggcggcgaaagcatgtcaactgattttatagatgataaaactctattaattactatagatcaagatactcatgatgaagaatttcctaaaagcggtgatttaaggctcgatgtagtatttccaaattataaagttaacataggaatggatgcaaacgcagatttttcaggattatttaataatataatcgaaaaagatttatcaacaaaaatttctgggtctgacaggactttagataaattagaatctgatgttttaggaacaacagttacttatagtgaacctcaaaaagaccatgatgataggtatatggattcttcaatgatcttaaaggttggagataaaatgtataagttaagatcctctggaagctcttcagatgataaagtaataaaaggaagatatgaatcaaagacagctacttatgatattcttaaagaccaaaaagatataagcctaatacctttaacttgtaatataacttgggacgaatttagaaaaacacatgaaaatggtaataaagaagaagatacaaataaagaaacaactaataatgtaacctattcaaaatctttcgatttctctgatggaagtaaaggggaaatatataatattgaaagaaatgataatactgtaaaagtatattgtaagggaagttcagaaaaggcaagtttattaatggcaagtagcatgagcatgtattatcattttacagaaggtcaagtttattactctaattatgatagcgataaaaatatgagtttctataaagatccaaatgttgctcttggatatatcgtagagtttaataatgtagaaaaagataaggcattagatataatttctagagataatatagaacaaatagatagatataatctaggaagtgaaatacaaatttctaaataaaatactgaaataaagcagtagctaatcaagctactgctctattctccgtttcactgttctctttaacattaaaacgtataatgcaattgcatatcataaaaaactgctttatctatatgaattattctgcatgcttatacaaaatcacactttcaatataatttatataccttcttaattcatttgattcttctctagtaatttctcctgattcatacatattacgaactgctgaacgctctatatccatggctttaattcttagttcttccttttgttttatgctttcctcattatatttaactacgtttcctttaaatctattaatcatggttctgtaatatagaattacgtcttgtgcagcgtttgatccttcatgacttcttagatattcctctaaggcttcaattgcagcttgaaaggattttaattgaatatcttttactaatttcaaattatttagcttgatttctttcctctttttgaactttttgtaaaaaatcttcgttgctctcgttaattttcttacaagaaacatagtatcttgactaggatttcttagaaagacttcttctctataatctaaagatttatcaagtgctttaaatacttgttcatcaatctcacttttacccattaattcattaatatattttcgttctgcctttaatgctattaattgtatttcaaccatttcttgatgattaaaatttttctcgactgcgcttgaggtttgctcaaatctaagattttgagatatacgtttatattcatgaattaattcataagctactgattcattttcatcatttatttctgactcaacagctttaataccagcaagtaaaagtttatttttggcttcaattaggtttttatccccaatctgtttgtcttcttctaattcacctttacataaaaacggtagaaatattgttgcgcatattaatgtgaataatattacgccagcagttaaaaaaagtatcagtgagcgttctggaaatgtatctccgttatccaagaaaaaaggcattgatagaactccagccattgtaaccgtacctctaacacctgttaaactagttaatagcgctatttttacattaggcacttctatatttttacttttgcttaggagatattcatagaaagctgaaatataagaccaaataaaacgaattgccaaaataacaaatccaattgcaataacatatccaatggcctttaaatttcctatattgggatcagctattgtttcactcattgataagggaatatttaatcctaataataagaatacaattccatttaatacaaataaaataatggaccatatattttctgtaagtacctgctcttccgctatgctagtttcaaatcttctgctgataagtgaatgaacaatacctgcaaccaccacagcaattactcctgatgcgtgtaaaaattcctcagtgattataaatattacaaatggagctaatatctgcagaagggagtgaaagacaacatcatttattccctctttacgcaaattaaatcttattaatgtcaagatcaaggcaaaaatcacacctaagactgcccctgctaaaaataaatatgaaaaatttaaaattgcatcttttaatgagaaatagcctgttactacagcagttatagcgtaattaaaggctactatacctgatgcatcatttatcaaagactctcctttaacaagatttagtactttttcaggtatatgaattctctttgctataccatttacagccactggatcagttggtgataaaatagctgctaatgcaaaggcagctgcaagaggaattcctggtatcatccaatgaatgaaatatcctccacctatagttgttaataaaactaatattaaagaatttccgaatattgaacgcctcattttccatagctcttctcttggaaagtatttcccatcattatataaaatcggcgctacgaataagagaaaaaaccattcttcttctaattcaaaagaagtatgtttaaatgcaaatgcaataattacacccaaaacaatttgtgtcaaagctgtaggtatagatggaacatagtgactaataatatttgaaatcaataaacatcccatcaacaataatatcgtcattagtaaatccacttcatatcccctcctctggtctattttaacttatatgttattactattatacatgataaaattgctcaacaataacatttttttataaattagtattttaggtatgtatcacatttctagtttgccctataaatataaaaaaatcacaggcgactgtggttaagttccgtattgtgcttcgcactcttttcatttaagttccgtattgtgcttcgcactcttttcatatgtgtagatttttttcacgcatctgcctttttgaatgcatgtgagaaaaatccgcacatcagaaatagcagctccgctgcatataagaacattttatacaggcgaataagatttctttttaaaatgccaaaactatccaagtaaccttttttaagttgcccacagatcttactggaatataaatacccatatgtgttgattaaccaaaaaatagaagtgaaaatatataaaaaatgaggtcattctgtagtaatattaaagtgcgaaccaaaataatacttaaggagaatgccctcatgaaaaatactaccact

SEQ ID NO: 190 - DNA, 4418 bp, Clostridium beijerinckii
catcgctcgacttgcatgtgttaagcacgccgccagcgttcgtcctgagccaggatcaaactctcaataaaaagtttaatcttagcttactcaaataaaaattgctggtttacttaaatgtatttatcttattctgttcaattttcaaagaccaattttctttcctacaattctcattgtagctattaatttatgtcaccctcaagcgacttatttagtatatcatctgctttacatactgtcaataactttttaatttttttgaactcaatcagaaaagtttttcttagttcaattgaagttatttatgtacctcagcgacgtttattatattaacatatatgataattgtcttattatattaaattatcctattaaatgactttatattcattatagtctaaaattcacgtaaaattctctctaattctattagtgatacactaggaatagttatattatataacatatagcttttactaactttcctttatttccattatgtttaagtacaacagcttagcgcatttgatataaaaaaagcaaatttcgcttacaaatattttggtaaacaaaacttgctttttttaacttatcttatatatcaacttatatcatttccaaaattagctgcttattaatagcttatttattgttataccctatcttctctagaataattaaagcagtatcttcaatagctctctctgtaacatctatagtcttacatcctatttttctcattattttatctgcaaaatcaagttcttctaacactcttgcatctcctgcatattcaatgtctgacgtaatcctatgaaacttatctaaccttcttttccttatttcaattaatctaagtggatttattgttaatccaaatactttttttctatcaatttcatatatttcatctggaactcccacttcaggcattaaaggaatgtttattgcctttacccccttattggctaaatacatacaaagtggtgtttttgaagttcttgaaagtccgatcaacactacatcggcattctttaatcccctataatctttactatcatcatattgcatagcaaattccatggcttctattctcttgaaatatacttcgtctgtttgcctcatagcacctgggttgtatgtaggatgtgtatttaatatagttgatgccacatttattattggccctaatacattcataaccgatatatttttttccattgctttttgtgtcaaatgctcccttacattaacagtaattatagtagatacaattatcacgctctcgcactcatttgcaatattcattacatcttcaacatcttctaaagattttacatatggaattcttttaacatctactttttctgtaaattgacttgccgctgcaacagcaacttggtttgcagtttctcctatcgaatctgatactgctaaaattgttaacatatttataccttctttctcataatctcatgatactttttataccttactctttttttataaatatataccctgaccaatgcttacaatactttaattaattatgtatgtgttcctgttatctctatattaaactaaatttggttcatttaacagtagtgaatttttttttactatatgttacactttagtataacgtaatacaattacagttggaggtactcttatgaaaaataaaaaagtgttaactataagtattcttcctttgatgtggactatatatgtcttattcgagcttattactggaagaattaatgatcttagaacaattttatttaatatgatactaattatattatttgcactagtaggtctatttagctacataatcggaattaaatacgaatgtggatttaagtctaatacacttgtaattctatttttctttctttttctatttgatcaaggaataaagatattaataaaactcttttggtttaataatgattttcctataatatctagcttgttatattttcgacctataattaatactgaaggttcttggctaaatgctagatttggagcatccgttaattttcctattttaataactataaatatatttgctatatttatttttatcgaagtatatagatattatttatacaaaggaaacaaggatttctgggccgatatgtgctttatttttgtatgctgtggtgctacatgttcgctgattgacaagattttttatggtggtagtttagattttataggaataagtaatttattcattgctgatataaaagacttatatattaatataggaatattattctttgcccttactatgtttaacaatggataccttgcatctaatgaagatacatcagttaaggaagatattcaatcattaagaaagtttttcttatttataaaaaaggatatctcgcataagttcaaatccttctaaacagttatctattagattagtaaaacctatgaatacttatttaatgttattcattttataaatttgtaatatgatatgtttcaaaatttataaaggtaaataaaaaaaagagttttactttcagtaaaactcttttatttatataaatactaagcaagtttttcaataagattacttttaataaagtaattggtggctcacccgggaatcgaacccgggacaccatgattaaaagtcatgtgctctaccgactgagctagtgaaccatcttacctcgcaacgtcctactctgccacacagtctcccatgcagtaccatcggcgctatagaccttaactttcctgttcggaatgggaaggagtgttacctctatgccatcatcacgagattttaattaatagttgatacaatcttcatctattacttcaaatttatgaaataatctttatataactattttataatatcttgtcgaaaacttgtctcaacaagatattattatacatagtattatctattatgtcaacacttattcagaaataaaacttattttatttttttggtatattcttttattaactctatagatcttttaaacttgctcaactcttcttttgtcatatgaatttccactacctctttaaccccatcagcatttaaaacagcaggtactccacaaaaaacatctttttctccatactcgccatctaataatgtagatactggcattatcttgttttcatcatttattatcgcttttatgactcctacagctgctgttgctataccataatacgttgttccttttctattgtacacttcccaacctgctctcgctgtttctagtactagtttatctaagtcaacttttcctactctatctttattgtcttttaatatctcgtagaatgacttccctccaactgtaacatgagaccatgggaccatctgcgaatctccgtgttctcccatagaatatccttgcacactacgcggatccacatttaatagttccccaatgaaattttttagtcttgctgaatcaactgaagtaccagtgcctataatatgactctttggtagcccagatatcttataaacatgatatgctatcatatcaaccggattggaaataacaataaagtgtcctttaaatccactcttcattattggccttacaatggattctactattttagctgataattctagtgtatctaatctagtttgcccttgcttaggcggtgcaccagctgttattaccacaatatctacatccccgcattgctcatagttccccctgacaattcttatatttctattcaaatattcaatacaatggtttaaatccattacttcccctagagccttttcttcatttatatcaatcattaatatctcatcacataccccttgagtcatcagactaaaggctgtactagaccctactaatcctgttcctataatagccactttacttttttttaaactcatatttaactccttttaagaaacttattcttactcatattattattattttacactcatttattcacttataattacgtatatatgaacgattaaatattatggattatattatacactatcttaactctcttctaagaatataaaatcagtcttcgtattcaaaatttatctaattaataaattaatccaatcttttattcctaaatgtttataatactgaaaataaattacttctttaataatttattttaaaacaaaaaaggttgttaataaaattaacaacctttgttatggtgcgtcatcagggattcgaaccctggacaccctgattaagagtcaggtgctctaccaactgagctaatcacgcaaatcttacctcgcaacgtcctactctgccacacagtctcccatgcagtaccatcggcgctatagaccttaactttcctgttcggaatgggaaggagtgttacctctatgccatcatcacgagatgctagtt

SEQ ID NO: 191 - DNA, 4325 bp, Clostridium beijerinckii
attactcctttaattgctatgccatgcggcactacaatcttatgcggtattaatcttcctttcgaaaggctattcccctctatgaggcaggttacccacgtgttactcacccgtccgccgctaatccgctcccgaaggagcttcatcgctcgacttgcatgtgttaagcacgccgccagcgttcgtcctgagccaggatcaaactctcaataaaaagtttaatcttagcttactcaaataaaaattgctggtttacttaaatgtatttatatcattctgttcaattttcaaagaccaatttttctttcttacaactactgttgtaatgttttgttgttatctgtcgtttctgacagcttactcagtatatcaccgctttcgaagcttgtcaacaactttttaaaaaactttttgaactcattttcagtagttctattagcttcaagttattaattctgcatctcttagcgaggatttcatcatatcatcaccattcgacattgtcaacaactttcctagaaaatctttttccctttaagttgttttgtttatgtctcttagcgacgtgttttatcttaacatctctgatatcttcatattatttgctttcctattactaaatgcgattatcttcacctttctttataatccgtcattattctatattttatgcatactgatacgctagcaatagttgtccaaagatttaatatcatttattatatatttaaacatttgtattgcactctcatatctctctaataagccctgataatctgagttataaaaatgctataacatctttatttttaatctttctaataaagttacttaatttgagtcaaaaatacattacacattcaactttttatcattcttgaatatctcaacgatttctaaacagcacttttaattttgcttttcgtataattgcccaattctgatttcacagaaaatatttttaaaacaaacattaatattcctgaaattattgaaataaaaaatattaaaaaccataatgttttatatccataaacttgaatatatgctccagaaaaaaaagtactaagagctgtacctagaaatctgccaagattcattattgcatttaatctggctctataattgcttggactattatttgccacataaacacctgagcttattgaacttaaaatttctcctaaagtccatattattgtggaaataataaaaaaattgaaattatcaatatatcctatcattccaaatcctatagcatataatattcccgtaaaagccatattagttaactgatgatttcttttagttataaaacctataaaaattgtaaggactaaaacagttacagcatttatactcataatgtagcccaaaagtttagcactttcattattaaattgagcatttaaagttataggcaaagaaaacttatgctgagcataaataaagttatataccatatataaaactagaaatagacttaatgctggccttttccaaagcatttgaaacgtatttccattttctgctatttcggctttactttcaacctttaatttactatttaccggataagtctctttgatatttttccataccaaaaagactgctattaaagaagttagtgtatcccctaaaaataataatggtaaaagattattaaataaaaaacctgctattattggtccaattgcaactcctgcatttatcgctaggtagttaagagaaaatccagcttgtctttcttccttagagagtatatcttgaatcattgattgaaatgctggacgtacaaaaccattaaaaaatgtacttatcaataaacacattatagtaatcgaaacacttttagtgaaagcacaaggtattaatgttactgctgctatactttgtgcatatgtatatattttttttcttccaaacatatctgatatttttccacctaaaatggatgctggtatgcctacaatagatgataatgtaactataactccagttgctgcagctgtcattccaattttttgagtaagatataatgcgagaaatggtactacaaaatctccaagtctgttaataagtgtagcaaaacatatcacatacatttcctttggtaatcctttataattattaatgaaatctttcatttgttatgcccccttttcttaatatattttacctataaaatccttaaattccaaaacattcccactaaataatttttatataaattaccattttaatgctataattttatctatatttcaatattttagtcaaatatgattattatctttttatttattggatcctattttatgacatttgcattagaagtattaggttaatatttagaagaatatataaagaagctaataaactttataaggaattaatgaatatataaatagttatatgatactgtctacatcagaagctatcactatcggattttaacctgatagtgacagcttcctctcctttaaactaagcagtagttaaaatttcacaaaatagttcatcacagatttttctttaaatccacacgatttatataaattaagtgccctactgtttttatcagccacatctaattctacttgctttatatctttttcacttattaattttaaagctgcctttagtactgctcttccatagccttttcctctaaactctggtaacacgccaaaacccaatatgaaagctgagtaatcattatattcaatatgaattttacctatgacttcattgtctaattcagctatataggcattttttattcttgattcatcttcctcaatttgttcagtttcttcttcagctaaaactttgaaactttcattttcctccttatcagaaaaataaatcaagtcttgtcttgataattccttcttatctgatgcctttgcttttcttaaattaataggaaataaattttctaaaaaatgctgacttattaattccatcccatattcagaaaaatcgtattctcctcctactgcttttataaattcatttccagatttagatttaccatctgttaataataatatcttcttaaaaccattcctactacattcatctattgcaaggtcaaagagttttttaaagataccttttctcctccactctggatgagtcattccattaagctcagctatatttcctccaaaacatgaaattccaagataagcaactaaaacataatctacataatataaaaattcatttaatctcttctttgatgtttctgaatttttattcatttctaatttaaagtctacttccaactttaaatttactttatcctttgaagttatgatttcttgaagttcatttatatctttatattctttttcacctatatattgcttcatagttattatatgatttacttctttcattttaaaatctcctttttgcttgcttttgaaatttttaaatttttcatagattttaattttaaattcttcattgcacatctctcctttttgattgctgatcttatcatatactattgatattactgaatctctaaaaatggacagaaaaatcccgcagacacaaacctatagatggcttctatctgcgggcattataaaaacaggcaaacctgttatgatattcgtccttaatagtacacatatttatgaaaggttatctaaattccgcgaaaatataacacaaataaaaggtacaactaccataagaatgtatttccgcccatatttatttttaaacagcaatcacctttacactctttatcatattaccatttctcctttcataagacttactatacttttacaataaatccttcaataaattaacattatcatatgcaaaaatatttgtcaattaattcaaatttattattctattccttcactaaaattagtaatcacattttttatgcaaaataaaaaaagatagttattacaactatcttttttgcttacctcgcaacgtcctactctgccacacagtctcccatgcagtaccatcggcgctatagaccttaactttcctgttcggaatgggaaggagtgttacctctatgccatcatcacgagatcttcaattgaaagttttgttctttcaaaattgcacacagtttctttaatgtatattacaacttgattatattggtcaagccctcgacctattagtatcagtcagctaaatacgttgccgcacttacacctctgacctatcaaccttgtagtcttcaaggggtcttactagcttatgctatgggaaatctcatcttgaggtgggcttcacacttagatgctttcagcgtttatcccttcccgacttag

SEQ ID NO: 192 - DNA, 4309 bp, Clostridium beijerinckii
attaataagtcttgagcttttgctacatactcatccttaccgcatacccctactttagtacagcccttacatccagctgtttcttgacattgataacaaaacattgacatattatgtcctcctatttcctatttttctttttatatgaataattaataatttcttgttaatctctcttaactttgacaatttagagtttactatattgccagtatcatttctgtaacatacgttactaaaataaaattaatattttttaatttctatattagctctgtgctacagatatatattactaaaatactctgcccaaatctgtaacaatggttacgcaatttcaaaaataaaaagacagctagtttgctgccttttctattcctactatatgaagattatatctataggaattatgattctggtgtaaaactacaatatcctatttcatcacatcgtgtcttcatactattccatacatccttttcagttatggcttccactgctgtagggtataatatataattttctttaaatatatgatctctcaaattgaatataatatattttgcagtttcatcaactttttctttaaattcaataaattttaatttagatacttctgttgctatttgcttcaaaaattttttctttgctcttaaatcgtcatgttccattctcataattcttgttggtcctgtaatttttctatcttccatctcagcgaaaagcacttcttcctctcttttatggtgattttctgcatctaatatattatcaataacctttattaattcttcaaattcaattaaattgctatcatagctttctaatttttgaatctttgaattaatatcttcaagttcttttaaaaatccaagaattttatcatgttctgcaataaatgtgtatacaacatgccctggttcaattttattctttattttatcaagttctcctcttaaaacttccatatgaatatcacacagatgtcttaaatcctgtggattcattccttcttctattaaattttgctccgctattgaaagctcaataggatttatgtcagacacaatctccaatgcttcttttcttaatgcctctgttattccatctttatttaatttttgtaaaacttcagtcaaactttgtattttggtattattcatctcaaaatcctcctatggatatataaatttatatattcaatatctctatgacctaattctacttaaatttttattataataatgtgatttaaatcaaaatttcaaatatttaagttataaaagaattaccattagaatattaaactttaaatttaaagaaaaaaggttatatttaagaataaattgatttgtttcttaaatataacctttattttattttagtttaagacatggcccatggcctgtagctataaggtcaggctttaacttttttaaagtttcttttaaatcttccagcttattattgtttggtatttgttcttgcttaatgctgtttacttctgtataccaatcagattcttgtactgtgcctatttcttttcccaacgcaaacatcaaatcactgctaaaaaatatcctacgtttattttctataactaataatccatcccaaagatgcatttcagaaggataattgataaactctaattcataattatcagtatttaaagtttcctctgctttcttagtaataatttctgcttttattccaaaaccatttaactgacgcgctgtaacttcagagcaaattgttttagctttaggaaaatgttctaatattaatgataatcctccacattcatctgcttcaaaatgtgaaataaaaatatactttagctctttgccattaagtacatcttttaattctggtagcaaagcttctgcctgaataacgttccctgtatggactaataatggttcatcccctaataacaaatattgatgaaatgtaaggttaattggttcaacatagctattaaattggtataaatctttacttataaatggcatattataaaaacaactccttttctctcttattgaatgtgccttatttctttgtgatacctattctccatatttcaggtccctgctctaaatatttccactcaaagtgttctggaaagttaactataaactgctgataaagcggacgaggatcatgatcatttataagctccattgtttcaccttgttcaagctcttcaaaagctttaaatataatctcctttttatgacctctttcataaattctaacatctatactaacagcaaaactcgacataattaattcctcccttaatattattatctaaacttcttcttagatgataatattataaccattgtgctgaatttttagcgtgatttatatcacattgtcagtaacttttgcttttatatgtatatatttcaatttctttagaatttttgttttatattaaagtaatactatgtaaactgttcttataattcttaatcactactatgtataatatcttaattcactacccaaaatattattgaaaatatttaataatatttcactgtatgaaaaagacagcaaattaatgagcttaatacctctttaatttgttgtctttctaaatttagatatatctgatctattctactttatttaattactgtcataccgcccatatatggttgcaatgcaactggaatatttacagatccatcctcatttaagttgttttctaaaaatgcaataagcattcttggtggtgcaactactgtattattcaatgtatgagcaaagtacttaccatctttaccatctacacggatttttaaacgacgagcttgtgcatcccctaaattagagcagcttcctacttcgaagtatttcttttgtcttggagaccatgcttctacgtctactgattttacttttaaatctgctaaatcacctgagcaacattctaaagtccttactggtatatctaaagaacggaataaatctactgtatctttccacattttatcataccaagtcatgctgtcttctggcttacatacaacaaccatttcttgcttttcaaattgatgaattctgtatactcctctttcttctataccatgtgcccctttttcttttctaaagcaaggtgaataactagtcaaagtttgaggaagtgaagtttctggtaatattgtatctataaatttaccaatcatagaatgttcacttgttcctattaaatataaatcttcaccttcaattttgtacatcatagcatccatttcagcaaaactcataactccagttacaacctggctacgaatcataaaaggtggaatacaatatgtaaatcctctatttatcataaaatctcttgcataagatattacagctgagtgaagtctagctatatttcccattaagtagtagaaaccattaccagctacctttctagcactatctaaatcaataccacttaatttttccataatatctgtatggtatggaatttcgaaatctggaacaactggttccccaaacttttctacttctacattttcgctatcatctttaccaattggaacacttggatctattatgtttggaatagtcatcatgataactttaactttttcttctagttctttttctttaacgtctaactcagccattctttctgaatccgcattaacttttttctttatttcctcagcttcttcttttttaccttgagccattaagccaccaatttgttttgataacttatttctatcagctcttaaagcttctacttcttgcttaacttttctaagttcgatatctaaagttaatacttcatctactaaccccaacttattatcttgaaacttattttttatgttttgtttaacaatctctggattttctcttacgaatttaatgtctaacatttttttccctcctgattaaatatatatattattatttcaaaaaataaaaaaaccatcccaatatataattgggacggaataatccgcgttgccacccaaattgctggttaatattacaaccagcccctcgacactagtattatataggttactaacctttgcatttatcacgcacagctccaaaagtggaaagatttaacctttcaccgattcgcaccacccatcggctctctgaagaaatttataaatcgtagtttttatcatcgctgttttttataactattaatttgttgctatgtatattatatatatatttatgttaattttcaagtatatgtttatatttaacttaataactagttttggaattatattgaccagttataatatac

SEQ ID NO: 193 - DNA, 4231 bp, Clostridium beijerinckii
agataatatagataaaattacaatataatgatataatttaaacataaatttaattatttatataaaaaataggtataaaagaagtattattttgtgatgaatatcaattaggaaaaagtattcttaatttaagtaagtattgctaaaatctttgagtaaaatttaataaattttaacgattaagaagtgggattagatttattgataattatcaattgaatagactatttgggaggtaatgtaaaaatgaaagattatttagaaattgtagacgtacttgcaaggcaaattttggactcaagatgttttcctacagtggaggtagaaatatatttagaagatggaactacaggacgtgcagctgtgccatcaggtgcatcaactggaatgtacgaagcagtggaattaagagatggtgataaagataaatttttaggaaaaggcgttttaaatgcaattaaaaatgtaaatgaaattattgcagaagaattaattggatgcaatgtatttgaacaaacttacattgataaaatgctaattaaattagatggaacaaacaataagagtaagcttggtgctaatgctatattaggagtttcattagctgttgcaaatgcagctgcaaattcattagatatgcctttatatagatatatcggtggagttaattcaaaagtattgccagtccctatgatgaacatattaaatggtggatcacatgctgataactctgtagatttacaagaatttatgatcatgccagctggagcgcctacatttagtgaagcactaagaatgtgtgctgaagtttatcatacattaaagaaaattttaaatgataaaggttatgctacaggtattggcgatgagggaggatttgctcctaacttaaaatcaaatcaagaagctcttgatgtaataatcgaagctataggaaaagctggatacaaagctggagaagagatctttatagcaatcgatgcagcttcatcagaatattataaagatggtaaatatgtattagaatatgaaggaagaacattaacatcagcagaaatggttgatttcttcgaagaatgggttaataagtatccaattatttcaatcgaagatggtatggcagaagaagattgggaaggctggaagcttattactgaaaaattaggaaagagagttcaattagttggtgatgacttatttgttactaatactgaaagacttgaaaaaggtattaatcttggtgtagctaactcaattcttattaagttaaatcaaataggtacattaacagaaacattaaatgctatagaaatggcaaatagagctggatatactgctgtagtttcacatagatcaggagaaactgaagatacaactatagctgatttagttgtagctgtaaatgcaggacaaataaagactggagcaccagcaagatctgaaagagttgcaaaatataatcagttattaagaattgaagaagaattagatgatgctgctgaatatagaggcaaaaaagctttctttaacttaaaataatatatagaataaataagaaagaagcatagacttacaatttacaattgtagctatgctttttttgtagaaaatattatttgattgaattgtaaaatattttataattatttcttcctttttctttcgctttatataatgctatatcagcattttttataagagtatcatcatctaagccattttcgtaaaaagcaataccaatacttgaagtagtaaaaaattcatattctccaattaaccatttatcttgtagagcttttaaaattcttttagcaatattttcagcattctctctttcgctaattaataataacgcgcagaattcatcccctccaaaacgtgctaaaatatcattttttcttaaacattcctttactctttgagaaaactggcataaaagctcatctccaatatcatgcccaagtgtatcatttactattttgaatttatcaatatccataaacataacacaaatatcttgtcctaatctctctttttcatttaaggcctgaagtaaatttgctttgaaaagtctacgatttggtaatccggttaaagtatcatgatatgccatatgtttaagttttttttcaagcaactttcttttagttatgtctctagcaagcataagaacatgagaaacatttttatgttcatctaaaacagcagaagcttttgcttctacccaaacccaatttccattaacatgtttatgacgaaattctacagttgcaacatttttatttttaattaaatcaaaaaacttttctttaatattttctacttcatcaaaataaacaaaatctaaaatggatttgccaatataggtatcaataggatatcctaaaacaaattcataagaaggagatacatattttataaatccattagtgtctataatgctaattaagtcagtcatattatctgcgattaatctatatttttcttcactctcttttaatgcctgttcagctagttttctatctgttatatcacgtacaatagcaattatatgtgtacattcactattgttatttaagattggtgtaaccttagtttcaaaatgtttaaactcactagaagagtaggggaattcttctaaatttgtataccatttaactaaattatcttcataagttacgcaagcttttttattaatagcttctttatattgttttgtaattaaatcggccacatttttaggcattatttcataaatagtttttccgattggactttcttttaaatgtatatattttttagcttgtttatttataaacagatatctaaaaatgttctcattatctatcttaataaagaaaactaagtcagatatgctattaaaaatctccataaatagatcaagatcattataaatatttaaatctttatcaagcattaatatcactcctttaagcaacaagataattagtttatattttaattatatttgtaaatcaatataaaatccaacaagaaatatttataatagaaccatattttcaaaaaaacaaataatatactaaaattatattgataaatagagaaaaagattaagaaattaagtgaaaaataaaaggaaattgtatataaatgtagaatatatataattgggtaattaaccagatatatactaattaaaatttaggaggagagaatttatgaaaaaatttgtttgttcagtttgtggttacgtttatgaaggagaagaagcaccagataaatgtccggtgtgtggagtaggaacagaaaaattcattgaacaaaatggccaattatcttttgctgatgaacacataattggagttgctaaaggtgtagataaagaagtaatcgatggattacaagcaaactttgttggagaatgcacagaagttggtatgtacctagctatgtcaagacaagctgatagagaaggatatccagaagttgcagaagcttataagagaatagcttttgaagaagcagagcatgcttcaaaatttgcagaattattaggtgaaatagtagaagcagatacaaaagctaacttacaagctagagttgatgcagaacatggagcatgtcaaggtaagaaagacttagcaacacttgctaagaaattaaacttagatgccatacacgatacagtacatgaaatgtgtaaagatgaggcaagacatggaaaggctttcaaggggttattggatagatattttaaatagaaatagttagttataaattagacaaactataaacaaaggtacatttaatttttttgttattgaagatataaaacatattttattattagcagttccacatgttataagagaaactcgagaagattatttaaaagaagtttcagatataattaaagagaatttataataaattataaattagatggaatttcatgatttattttatttttgagattttgtaatttacatgatgataaaatattataaagcaggagtggatagcttatgaatcagaatgatcctattatagaagttgtaaataaaaaattaattagaaattctaattttgaatttattgctgaattaaaagatttaactttatccgatattgactatattgagaaattttctaatattaaaaatatcaaatcaaagtttacttatcaaattgtagataatatttatataaaaattacttttcaatataacaatgaggtatagatatggaa

SEQ ID NO: 194 - DNA, 4157 bp, Clostridium beijerinckii
ataaaaatactcttccaaataataaactgtaaaaattatattattctatattttaatataattccaagaaaaacctcgatatttaacatcgaggtttttctataattttaaatcacactcaaattaatgttctaatctttttttactcttgggaaatatactgtatgaagtaactcatgagctttattacttaatggatgatctaaatatttttcatatatagcaagtacttctggattttcatttgatcttctaagtgtctttgatctatctatattattcaatccttctgctcttttttgcaatgctgcctgcttatttccctttgttttaggttgaccaccaccgccgatgcatccacctacacacgccattatttctattgcatggaagaattcttctcctgatcttattttatctaacatcttagctgcttccctaagtccatgagcaacacctattcttaattttatatctccagcttcaagttcgcaaactctgaatccatcccaacctctaaggccttcaaattctatattatcgaatctttctccagtcatcttttcaagagctgttcttgtagctgcttctataactccacctgttctaccaaatataattccagctccagtgtattctcccataactgtatctatttcttcatcttcaatttcttttaagtttattcctgaattttcaaatattttaataagttctcttgttgtgattacataatcaacatcatagttcatatctactgaaaattctgctcttgaagcttcatacttctttgcaatacatggcataatagcaactgaagtaacttcatctcttgaaagccccttctcttttgcccatatttccttagccactatagcaaacatctccattggagatttagctgaagaaggaacatctaacatatctccataattctgctctataaatttaatccatgaaggacagcatgaagtaagaattggaagttttacactctcatccccagctagatgtctttcaagtctttcttgaagttctgcagcttcttccattattgttaaatcagctccccagctcgtatcaaacacataatctactcctagttttctaagacctgctgctattttcttttcaacattctctcctggttcaaagccaaaagcttcacctatcgcaactctaactgctggtgccatctgagtaattacaaccttattaggtgttgctaaatctctaagaaataacatagtattatctcctgcacttattgcatcaacaggacatgcagagacacatgctccacaatgtgtacatctattataatctatttcatgtttcttttttaattctccatttatgcaatcaacaggacatgctcttttacaagctccgcatccaatacattttttagtaattgttaattttactaaatggttacattgtgatgtataacacttcttttcctctatatgttcttcaatttcttcatagaatttgtctattatttcttccatgatattatgcttttggttcatcttacttttcactgtcactgcaagatttctcaaaagataaatctcacgcatattagacacacctttacttattctgtttaatatattaaacatttcagttatgtcctctttaacaacttcatagttcttataagatccatctttaatttttgctagtaaatattctatataaaatttttcaaattgaataatacagtcttcttgtgataaaacaataattgttcgtgcaatattttcataaaatagtccaaaatcaaattctttatctaagctgtcctctgttaaaaaaccaccgaaaggaagtcctatttgagctgctttaaagttacttttgtttataagcccaccacataattgtattatttcattaagtgtagccccttccggaacttctattatccctggattgttaacttttccacatatagcaatttttctgccgtttgacagttcttttaattcctcttcgctaaaaacagaaaaaactgaacctaatgcactttgtataaaagattttttattatctcccataatattcactccttaacattttgtcttctttttattttcaaatctaatcatataaaatatatattatttagtataattgtttattatttttaacaaaaccgtcgcataataatctattgtatctattaacgcactattttaataaagaaaatccatatatatgatacaccatatttcgagaatttttcaagttaataaaactttcttaacacgtttaataataaacttattatcctcccccttaagttaataacgagataaatacgaagctctcaattttatgcatcgccagtctattataacatatatttatagaaaattattaaatattatatgattattttataaaaaaagacaacaaatttattaataataaatttgttgtctaaaataagtattattttagaataatctccaagctatgtaccgcattttatcaaaatagtaagataataaatatttataaaaacacaatttaacgtaaattctgaatatattaattattacctatcaatattcttacttaaatactccttaatatctagtaaattctcaaagcttttatgacaatactttagtatatcattgtcggctttcttaagatcttctacatgtattcctatcattttagctttatatgctccttcaatacctgcagcagaatcctctataacaatacaatcttcaggatttacacaaagctttttagcggcctttagaaatatttctggatctggtttggcttttactacatcatcaccataaaccataacatcaaaatcttctttgatatcagtatttctaaactgaatattagctcgttctattttagctgatgtcgcaagagctattctatatcctctctcttttagaaactctaaaatttccttcgccccttctttaatagcaatttgaccactttctactgccttctttaattccttatctttttcttcatacatttgtgttataggcaagttttctccatataactctaaaaatttcttgattacgtttttccgtcctcttcccattacagaaatatagacatcatcactcatatcatatccatacttcttaaaaatctttctccaagtctctaggtatactctctctgtatcgaatataactccatccatgtcaaataacaccgcttttatttttttcattattcccccgtgaattaattttttatttaatcaaaattctctcttttttaaagaccttttaaatatcatttatataactccaaattatgtataaggaatctatatatctataccctttaaaacatcttgattaaatttctcaattccgattctatcaataaaaaatcccagcttttctcctgcctctgcattttctatataatattcaaaaatattatcaactaaactcaatgcttggctttctgttatatctttagcaataatatctgccattcttgggttataacctcctgatcctcctgctgcaacaataaaaccggttttatcggctatcactccaatatctttactataaacgcttccacaagcatttctacagcctgctactcctattttagtcctacatggcatttccatccattgatattttcttgaaagtttcattccagtcccaattgtgttatatttagatcttttacagtatccagctgggcacatttcaacattcttaactgaattttgtgttttaactgctggttccattccaagttcattccaaacattttccaagtcttcttgcttaagattagttattaatattctttgtcctgaagttatttttaatataccattatatttttttgctatatccacaattttttgcatagtttctatagtaataaaacctcctggaatatgcggagttattccaaaagttctctttccattacttatcttctgaagatttccaaaactcatattatatcctcctcttatgtgtattaataatatttaatcctgaattattcatagatatagttaataacataagaaagttagtttttcatgctattagctatttcttttcttaatttttaattatttttctaaatatacgtacagcttcgctacggactttagg

SEQ ID NO: 195 - DNA, 3926 bp, Clostridium beijerinckii
aagttgatgaggtattagataaatctaatcaggaggaggtagattttatggttagcaatttaggaaagactttagaaaagatggaaagaaaagcaacagaaaaaggaatagaaaaaggaatagaaaagaaagcaaaggaaacagctataaaggctatagaaatgggaatgaataatgaggttataactgagttaacaggactatcaaatgaagatatagattttattagaaaaggacaaagtcactaactgagccacccatgggggaaataaaaattagcaagtgaggcacttgtgactcacttgcacccccgaggtccaaaattttacaggtacaagcaatgcactaaaggattatttagtgcattttttgttttaagcgaatagtttttaggatataatataactaataaatagaaataaagaggtgagtggattgccagaaataagcctattttttggaataagaattactataaattataatgatcatgtaccaccacattttcatgctgaatataatggtgaaaaggcattggtagatattattaatggtagagttatgaaaggatatttgcctaagagacaattgaaattggttttagcttgggctgaaattcacaaggatgaattgatgcaaaactgggaattggctagaagtcaccaagcattatatagaatagcaccattgagttaggaggatgtttaaatggaatatatgccagaagttattcaagtaagaccaacaaatgatttcaaagtttatgtttattttgatgatggttcgattaagctatatgatgctaaggagttaataaataaaggtatatttactaaagttaaggatataaatgtttttaaggaaacttgcactgtcttaaatggaacactggcttgggatttggatggtaattataatgaaaatacatgtttagatattgatccgtttgagatatatgaaaattgtccggatgtagatgagtagcaattgatggtacgccaagcaaggggggaatagccgaagcaagtcgctcgcaaactctcgactagcaacccctgaggcctaaaattttacaggtacaagcgttgcactaaatggaatcttagtgcaatttttggttttaaggaaattggctatggggtataatattactataatcaatatcaagtgcgaatatatatgagagaggaagtgaagcttgtgtgtaaattaaatccaaaagttgattttgcatttaaaaagttatttggaagtgaagaaaataaaagtatattaatagcatttataaattccataatatcagagaaaaataaaatagaagatatagagttaaagaatccatataatatttcaaattaccgaaaaggtaaaatgacaattcttgatataaaagcagtagatgaaaaaggaatatggtatgatatagagatgcaaatagcagaacaaggcttttatgataaaagagctttttattattggtcaaaggtgtattcagatcagatagaaagtggagatgattttgaaattttaagaaagactataggaataaatatattagattttaattacttaaaagaggaagattttcataatgtatataaggtttataatgaaaaaacaaaagaagaattttctgatttatttgaaatgcattttatagaactaaataaatttaagaaggattataaggatgtaaaaactgcgttagatagatgggttagctttttaaatagagcttatgaaatagataaatataaaataccaaaagaattagaagaagacgaaaacataaaaaaagctatagaaaagttggatataatgtatttagacaaagaagaaagggaaatatatgagaatgatttaaaagcactacgtattcataatgcagaaattaggagtgctgaagaaaaaggaataaaagaaggaataaaacaaggacagtatcaggaaaaaataaatatagctaaaaacttattagattttttagacaataaaacaatagcgattaaaactggattaactatagaagaaatacaaaaattaaggtgagatatagcaagcattcgctaaaagtactcagtaatgatacaatccatctctccatattattttatcatatgacagagtagctcttttttcagtagaattactttcatttgaattagtagtattccttaatatctagtattttaaaccaatttatattttttatactattgaaaaaggctcgttacaacaaagtaacgagtcttttaattttatgctatatcaatttttgtaacagttttctgtgttaatttagcgtctgatttttttactaaagctccagaggagctgaagaagacattcttttgaatgattgtgtccataagagaatttacctcagcaggagtaacatcaggtttaaccccgctgatactgaagttgctttttaatccattttcagttataaaagtcattgctaaaacatattccataatttaaatccccctaaaattttatttatagtagttaaagattgattataagatgaaggataagagaaagtacctttttaaatattaagtaaactaaggattacttaaagtttaatgcatattttgaaaggaaagttaagtgtttgattgagctgtttttattcttgagtaaggcttgaagattcatttaacaaagtggatcttgtaccagtggacataacactcttaattgcttctcctactgcatatgcattttctggagctacgtcagtcctcacatttgcaaagcttttcttgctgtagattgggtcgccagctttatccaacccactttgaacctcgatacttaaagatgtagttttaatttgttttgctactgccatattttcttacctcctaaattttgttctcatattgtatatacataaaaattgatttttataaagggtaatttgaaaatttttttaaaatttattttttatttcagattttgaacttcgctatcacatgaagtatcaatgacaacacctagtttagtagaaattatagtatttaatttgtttattgaagatgaaagggtagatagttgtttttcaaggcgaaatagtaaataagcgcacactgctataggaaatccagcattagtaataaggctcatcatatcgttaattcccataattcattacctccaacaatacaactttttaatttttttaaagcttttttctttctttttaaagctgtcatatatgatacattctcatgataagcataatttgtaagggtatttttcataaaaaagacaaagtttattaaatacctctctgaatcgcttaaattattttttattgcagataatagtttaatgttctcatattcaagattcatactttcatcttccatatcattacttagagaagtattacactcaatatcatcacttaaagagaaatatccatcaatatcttttcgattatcgtatctttttagtagaacaagtagattattttttatggaatttgtggcatatgcaacaaaacgatgagtatttaaatcgtacttagctatgcagttaaaaagcattaagaagcactcatttttaatatcgcatttttcataaccatggataaatgttctcatagataaggaatttataagtggagtaaattccttaattaaattttctttagctttaaggtcaccacccttagcctttgaggctaagtgttcaatataatcataattcacatataatccctcctaaaaattacttttcataagagatatacagaaaaaaagatttttataaacactttgggaacaaattttaagaaaaaatttaaaaaaatatatattgcaaaaataattcttcatgataattctaaaaatattacaagaattttaaccgtaattgtgaattgcaacatatataggatattaggtatgtac

SEQ ID NO: 196 - DNA, 3788 bp, Clostridium beijerinckii
aattatcactgtactgttttctctcgcaattttacgattatatctccattaaatagcattcgattctgataaaaaaataaattcgaacgttattcaatactatattttatacatttaacgaaagttcaaattcataataaccaaactcagtttttgatcaaattaagataatttttgtatctaaaattcacatatagaaataatctcaaaataaaaaactatatctgcttttatgatataatttaaataaacaatgttattaatcattagtaatgaatataaactaaaacttacggaggaatgttgaaattatggctcaaggaaaaggaaaaactaatgctatgagaattctagataataataaaataaattacataactcacagctacgaaaataatgatggtaagatagatggtgttgcagttgcacacaaaatagaaaaagacgttaatcaagtttttaaaactttagtaactcaaggtcattctaaagaattttatgtttttgttattccagttgctgaagaattagatatgaaaaaagccagcaaaatcgcaggcgaaaaaaatatagaaatgattcatgttaaagatataaacaaagtaacaggatacattagaggtggctgttccccactcggtatgaaaaaaatatttaaaacttttattcaagaaaacgcattattatttgatacaattgtatttagcggaggaaaaataggttctcaaatagaaatgaatccaaatgatctaaaaaaagcaatagaatgttcatttgtagatataatcaaaaactaattaaacaattgtcacaatcaaaagataagttctttatagatatccaactctaaaactaaatttatgtgataacttaccgaaatcataaatattttgttccgaaaagctatgaaaatatcgcttaaggttctaagcagcaggttgtagccactttagcacgttccaactttcagtttgacaagctaagctggaacgacctacagctaagaacctttaaaagctcattttcaaaggttttctccacaaatatatttatgatttcttgtgaatatacaaacttaaagtcttagtaaatttgaaaatatattcatctaataaatctaatccttaagctgtttatctatatatttaaaaaaataacaaattaattcttatattttacagaacaaatgttcgtatctacttatatttttttattttaaccaactaaagaaaatagtctgtatgatcattagggaaagttataacacctctcctattaagaatctatacagactattttaaattcattttatttaaatcataaatttattttttacttttcaacttctccaattaaagagaacgaattagctttaattatttttacattaaccaatttccctattaggtcttccccaccctcaaagttaactagtcttccattcctcgttctacctgttagttttgcttcatcatttttgctataaccttcaactaagacttcatatatctttccttctgcatccttatttcctttagctatgcccgtattaactatctcaactaatctgttgaaacgttcatgtttaatttcatctggtatctgattctccattttatccgccggagtatgatttcttctcgaataaataaatgtgaaagcagcatcatatcgaacttctttagctagctctaatgtttcactaaaatcttcttcagtttctccagggaaaccaacgattatatcagtagaaaatgttacatctggaatttcagctcttatcttttttgctaacgtgatgtattgttcctttgtataatgtctattcatttcttttaaaattctatcagaaccactttgcactggtaaatgaatttgctcgcatactttatcacaatctcttatagcatatacaacatctaaagttaaatcttttggatgagaagtcataaatctaattctttcaagtccctctatttcattaacttttcttagaaggtctgcaaaagtaatattttcttccaatccttttccatatgaattaacattttgtcctaaaagagttacttccttataccctcttgttaccatatcttttatttcatttactatatcttctggctttctacttctttctctacctctaacataaggaactatacaatatgtacaaaagttattacacccatacataatagttacaaagcccttaatatcgctttttcgatctataggtatcccctctactatttcagtttccttatcaataatctctttaatttgaacaccttctgttttaactctatttaaatattcaggaaacttatacgagttatgagttccaaatattatgtttacatatggaaatctctttaatatatcgtcagccatccctttttgctgcatcatacatccacatattccaataactaaatcaggattcttttccttttgcttttttaaagcgccaagatttccaaaaaccttattttctgcattttctctaacacagcaggtattaaatataattatagatgcttcatctctattctcagtattttcataccccatccttttaagcatacctgaaagtttctctgaatcttcttcattcatttgacaaccataagtttgtataaagaataattttttttcatcactagccatttggctatctagtttttctatatcaaagttcattattgttcctccgtataaattacaatttctatagtattataacaaataataattctaaataaaagactataattatgcataattaaaggagttatactcatagacaactcctaacgctaattaattaatttttttataccaactaataaaagattgatattccctaaatccaattttagtgtacaaagataaggcttttaaattattcttttctactcttatataaacagtttttatagaatttctataacataaatctataagatatctaaccaataactctccatacccatgttttctgtactcttctaatattcctaaattaacaatagtataaaatcctctattgaaaataatttgaccatatccgacaacttgtccattattgttacatataaaaacaccaaaatcttttatataatagtcttcctcttcttccctatatatatcttcaatcgttaaaggaactctatttttttcattaaaaaccgaattttgaattctgcatcttaattcttcatcttgtccttctttaaagtgtttaaaaaatattctattttcacaaaaattatttttaatattgcttgtccttatcttcattaaaatgttattagaattaacatcaaaatttaattttttcattataaaagaagcctttgagtttgctaacatatcgaatctgaaggcactagcattaaaaaatgataagattttagaattaattaaatgtatatattcatctttcaaatatatagaatatatattactaaaaccattatacgaaggatattcgtaccatatatatcccacatattcactattaactctaaaaagtctaatttgtttacgaattatatattttactataaaagattcatcattataaatttcaaaaaagcttttatcgcacgaatatgcatcttcactcctattatataatctcctgaaatgattcatattgaataaagataatttttctaaaaaaaccataaaaattcctcatttcccctttaataaataaattataaatcttacaaaaattatagtcaacttttgatagacttaaacaatgtgttaatatatagaat

SEQ ID NO: 197 - DNA, 3663 bp, Clostridium beijerinckii
ggttataaaataaattcatatgatagaaaattaaaattaattaataataattattgattaataatgaattatttgctattatatatatagaaaatatttaaacactaaaaaagatatttaatgatcaagtgaatataaaaaaatgagattacaataatttatgatagtatgtgaaatgcaacaagatagatggctaaatgtatatcataaggaataacaagtaataatagagagaggtagtagttaaattattaactctgcaagaagtcacaaaaatgatataattatagaaacttttaaactaaagatcgttctaattagctcatcgcaataaatgcagaagcgcttaattgatatatattttacaagatgataaattaatatagtaagatatgtatttattaatatttaattatcaaatctaagggaggtttttttatggaaaaatatatttgtacagtatgtggttatatttatgatgaggcagcaggtgatccagataatggagttgcaccaggaacaaaatttgaagatatcccagacgattgggtttgcccattatgtggagttccaaaatcagattttgaaaaagaacaatagtagatattgttttaatttaaatttgactatataattattttagaaaatttataaataagaataaaatatttaaaaacaatagatataaggggctatcaaaataattttattatattttgaaagtcccttataatatatttagattaattatttaccacaaggtcctaaataataaaaaatgggagaatgcatagatatgtttacagaagagagactaaacgaaatattaaatattctaaatacatatggaaaagttaaagttaaggatttaagcaaaaagtttaatgtgacagaagattgtattagaaaagatttaaaacaactggagcatgcaggaaagctgaaaaggacgtatggaggtgcgattcaaataagggaatcatcgcagttgtatgacatttcagaaagagagaagatagatatttcaactaaaagcataatcgctaagaaagccttagaactaatacaagatagggaaactatatttttagatttatcaacaattaatattcttatagctaaatctattttaacaactcaaaaaagaataactgtagtaaccaatatgttggagatagcaaatattttagcaaaggcagccaataatattactgttgtagttgcatctggagttttaaataaatctcttaatggttttattggatcttcaactaatgattttattaaaaaatataaatttgataaatcttttataggaagttgtggaattgatgcctttgataaaagtataactacttttgaaattgaggatggaattactaaggccacaataatacaatcgagtaaaaagacatttttagttatggagaacaagaaattttttgtagatggtaattataaatttgcaatgattgatgatataaatgctataataacggatgaaaagcctaatcaaccaattatagatgtgttagaaagtaatgaaattgaattgatatagaatataagtaaatcaattattagaggtagttttttgctgcatataaattgatgataagtgtaaagagacaatttatgcaatttgaacataatgattgcatgaattgtctctttgatatgtttacctaagcacagaaatttgtaattgagatattactcctttaaccacattaaaatagcatcttccttgttatcttcatagtacccttttcgaattccctcttgtttaaagttatatttttcataaagggctttggcagcggcattactttttctaacttcgagagtatatgctacacacccttgagatttacaataagatagtaattcttctaggattttagaggctattccttgttttcgatagtttggatgtgttgctatgtttgttatatgagcctcatccaatactatccatgttccagcaaatcctacaactttattatcaactttagcaacaaaatatttagcaacaggattggttagttcctgcatataagaatttttgctccagcatatagaaaagctcaacgagcttatatctaaaatttcatctatatcttcttctttcattaaatttatagctatattcactataatctcatcctttgctcgtattctctttcagcctgagattttttgagataaaccggagcagaatttggatcgtcatattctccgttctttaatagtgcactgcctatttcacctaatgaagaggcacgaattaaattaaggtgattaggaggaaaatatgaatttggacaattatcaatcaaataatctttatatttatcaacaccatcgcctataaaaataactttttcatttttggatttaattatttctataagttcatcaatatccaatgctgaataatctaatagacgttccaattttataggtaaatttgaagcattattgttactgcagcaagtatattctcctttatatagtgaagtataaacactatttcttaaagcatccattatagggcatattataccatcgaaattagatacgctaaatgcaagtgcatctaaactagaaacactaatgtaaggcttgttacttcccaagctaagaccttttattgttgccatgcctattctaagtccagtaaatgaaccgggacccttcgaaataacatagccatcaatatcatcaatacttaagttgttattgtttagcaactcttgaattatagacattagtattatagagtgttctttcttatcgtttaatgtaatttctccaagtagtttatcatctttcatcaaagcagcagttgccactttagaagatgaatctacggcaagaataatcatattttcaactcctttatataatcatatctttttccataagcatttagcgtgatttttctataatcttcgcctttgctgtaatctttctttatatctatatgaagtaaatcatttggtagaatttcttctatataatttgcccactctattattgatactgcatctgaaaatatataatcatcaaatccaattgcatatatttcatcaggatcacttactctataaacatcgaaatgattgagctttaatcgaccgctatcatattcgttcactatagtaaatgttggactagtaatattatcgttaatgcctaatcctttagctatgccctttgtaatatgagtcttacctacacctaaatcaccagttaagcagattatatcaccggcatttaataatttgcctaaatttattcctaatttagcagtatcatctacattataaatttcaaattccatgaagtgcctcctttaagtgagaattaattcttattaattagaattttatatcaataacttacatatagttattatgtatagaacctaataattgttaaatctaaaaactctcatctttttattttatctcaaaattgcataaaagcaaattaataatgtattaactaatttaattatataaaacaggaaataagcattcaaaaaaatgtaataaatttgtatatatttattttaaattagttggtataataagaataggtatatgctaaaatttaattaacagagtaattactgaggtaacatatgtaactcaatat

SEQ ID NO: 198 - DNA, 3572 bp, Clostridium beijerinckii
atgtaaacgtataattaaatttaagttttattcttattggggagatgtaaaaatgtttatttatatattaaatattttaaaagatggggcaaggaaaaataaaattgaggggttatcgaacattgaaattattaatgatacaggttgcatttcgaggttagcaaatatcaaaagaggttctaatcttaaaagttttaatagtgaaataggagatattgtaggaattttggataaatataaattggatagaaatgatagaattgagattttgagtaagtttatagttgataatgactataataggatacttgaaaacatacatgacaatttttatattaaaaaaagagaaaaagtaattatagattcaatatcaatactagaaaacatatttataaaggcattgttttagataaagagggaaatttgattgaaatactaatttaaaataaaaaggagcactaaatatagtgctccttatattcaatgaaattaagctctgtttactgaaccgaataattccattttttctttaactgtagctttgatagcttcgaatccaggatttaataactttcttgggtcaaatccttttccttctaaatcttttccagcttcaatatattttctagtagcttcttggaatgataattggcattcagtattaacattgatcttagctactccaagagatatagctttctttatcatatcttcaggaattccagtaccaccatgtaatactaatggcatagaagttccaacagcttcttcaattttagctaatgcttcaaaatctaatccagcccagtttgcagggtattttccatgaatgtttccaataccagcagctaacatagtaactcctaattcagctatttgcttacactcatttgcatcagcaacttcacctttacctataactccgtcttcttctccaccaattgaaccaacttctgcttctaaagaaagtcctttttcattagttatagcaactaattctttagtcttttctatattttcagctattggataatgagatccatcaaacatgattgatgagaatccagcttcgatacatttttttgcaccttcatagctgccgtgatctaagtgtaaagcaactggtacagtaatgtttaattcttcgatcattgctttaaccattgcagatacagtcttatatcctgtcatatattttccagcaccttcagatacacctaagataactggtgaattattttcttgtgcagttaataatacagctttagtccattctaagttgttgatgttgaattgaccaactgcatattttccttgtctagctttgtttaacatttctttagctgatgttaacattttacgacctccgtatacttgtatatttattataataactataatagcttaggaaaaatgatttatgtactttacacatcagtttttcctttttcaaacttattatactctaaaattaactatatgaaaacaataaattgaaaaatctgcttcttttaataaaacatatgtatctttatacgaaatttacataatatatatttagataataaaaatcttattttatgaaagagtggtaatatgtagaatttaattaaaaaaaggacttatgtagagaaatgatggtacggataaaaaatgctaaaagttagatttatattttgaaataagtaccatactagaaagtaaaaactttttataactacaatggtcataagatgagtaggcattttaaaatgaacttttagagcgcttaattttatatgtattatctagataattacaatattaaaattttatataatttagttttattaattctattacatgtgaggaggtcattttttgtttaacataggagataaggttgtatacccaagtcaaggaataggaataattgatgttattgaagaaaaggaactcaaaggtgagaaaataaaatgttatataatacacttaattaataataccatgaaattaactttacctattagtgcagcaaatacattcaatataaggttagtgagcgatattaaaacattagagaatagtttaaaacatttggatagatttatgacagaagcagaaaaattttctaaaattaattataaagaaagaaggaatataagtaaaataaaaatgaaatcaggcacatttgatgaatttattgaagttatctttaatttaacacaattgaaaagatggcatagtttaaattcaagtgaaaaacaaatgctaaatcatataaagaaaattgtagtagaagagattgctcaagcaaaatgtttaacaagtgatgaggcttctgagttattggatatctcaatgaatttaaaaagttaagttaaaaagtttgctattttactgaagtatgttataatgaatattgtaaataaaataaaaggttttttatagatatgtaaatttctcctttagagaattatatgaatcaatatattaatctttagttaaaggaggaactttatatgacagataagactttagtatgcagagattgtggagaagaatttgttttcactgtaggggaacaagaattctaccaagaaaagggatttactaatgaacctacaagatgtatatcttgcagaagaattaagaaggaacaaaataatagaagataatattattttattaagagttgtaagattttcttacaactctttttttattctttagaaatttatattccaataaaatttatggataacttaaaaaaagttgcctagatagtttttgcgttttaagttgatagattagaaacattaataagaaatgctatagatatgggagttaaggtgggagcgtgttctatgagcatggagttaatggggattaaaaaagaagaatttattgatggggttgaaattggtggagttgctttatatttaggatcaacagaaggttctggactaaacttgtttatttaattaataattgtttgtaatataaatatttcatagacttggtaattaataatttcaccaagtctattttttattgtttgtttttacaatgattggtgataatatgaaattatagaagacaagtattgggattaaaatatataattagaatgggatatattttaatttgaaaatattatcatgcaggtaaaacaagttaataaacgtttatataaacatattaatatgaaagcgagggattttatgagagatttagaaaatggctcaaatttaaagacaaaaaagaaaaatacaagtatgatactagctgcgttcatgattttcattttgccaataatgctggtatttataggagcttttataggtggaataataggtgaaaatatgcaggtggcttctgatagaacttttcaaatcgtaggtggagtaattggctttttgttatcagccataatagtcaaagtgtttgataaacattcaaaagcagatgaaaagtcagagaagatttattgggatgatttataaataactgatagaaataataaggaattgctaaataaaaaatatttgttgacaattgtttaatatatagtaactaagaatatatttcct

SEQ ID NO: 199 - DNA, 3561 bp, Clostridium beijerinckii
attatattgtaattttatctatattatcttatatttttctaaaagaagtaaatattcacattttaaatttcactattttaatcaaacaatttaatcttattcaaaaaaaacagatatacattataaccatttagtttttacaatatattttcagtatttcttattttttagctctgttaagaatcggactagatccaaatgaataaccttctccatataatttaatttctaacttaattagttcttcagctaaaattgtatttgatcttaaatctgttggttctttcactatatcaagctcaatacccttattctttctataataactataatttttccacatccatccttttattttttttagagttgatggttttctaataatctctagtatggtttttctatatttttctatatcttctttttgaatattatctaaaatagataattcatgtcctaaacttcttgatgttttttcatctagttcttggcataaaaattttactatatgccatacttcatagagttgatttttattttctatttctgcttcttttatccaagtaaacgcgtttactcttcttactatatcccatctttttattggactttctaaatcatctgcacataccaagaaaaatccttcattaagtaacatagcgccaaatatttctggcggattaccaagtctcttatcctttaaagttgttctatatacgccacagcttggactaccttctttgtacatatatatgtatattccttcacgctttaataattctaatgaatattcacaagcttttatgagtttatctgtaacatcttctccttttctatttttaatcttagctgttccttgtaaaacatcttctccactcccaccttttatgcttataggtgttcttggaactcctaacccagcaaggcattctggacacaaaggataaaatataaattgttctttttctctgccaaaatttttaacataatcaaatcctttaccgttatatcttacctttgagccaaaacaacattcactaattccaacttttatctttcttttcagtactgtctccatataaacacctcttttgaaactttttacgtaacacactcttaaacctttaaatttaaatctgtgcatagattaagttataatactttaatctacgcacaaatttaattgcgttacttttgaaattgcaacatttcactaattataaacttaaacatcctgctttttaggaatttttataatgaagcacgcaccaccttcaggattattttttccttcaatatttcctttatggatatttacaataacatcgtaggcaatattaagtccaagtcctgttccttttcctgctggtttagttgtgtagaatggttcaaataatttatttagcgcgtcttctcttataccaattccattatcttttatttcgcagtacacatatttctcatccatatatgtcttaattgctataagtccaaattcatcgctctctttttccttaatagcatacacggaatttaagataatatttaatataacctgatttattttttgcctgctggcttgaattagtgggatatcctcatattcttcaatcacatttgctataaacttaatttcatttctagcaacaattaaagtattctttattccaagattaagatcatacatttcaaattgatttgattgatcttcatgcgcgaaccatttcagtccttttactattgtactcaaacgctctataccatcttctgactcatcaaatagattatctaagtccattaatatgtagtctatctttttagattttcccaattctttaattttatctaattctctttcaattaaaccaatatccttttgctcagcttttaatattaattctttatatgcatatattagacttttcaaatttttcgtataacttttcaacatttcaaaattactcgatacaaaacctaaaggattgttaatttcgtgagcaaccccagctgcaagctgtccaattcctgccaacttttcttgttgaatcaattgagcttgagtaattttaagtttgcttatggcttctttcaattctttattatttttctttagctcctcttccataagctttcttgaagtaatatcctctcttactgatataaaatgagtaatatctccctcttcactcttaagtggtgcaatactcgtatattcccaataattacttccatcttttcgtttattataaaattcacctctccactcatctcctagaagtacgcttctccacaaatctatataataagttttttcatgaaaacctgattttaatatacttatattttttccttttaattcttcattagtatagccagtcatatctgtaaacttaggattgatatactctatctctcctttaatattagtaataacaacactgcttggactgttttcaaccgccaaagatagttctttaattttttcatatgcctgtttccttgaactaatatcatttgcaactgaaagaattaccttttgctcctgaagattaaatatatgtaaattcacttcaaatggaataataaaaccactttttgtcttaatatttacttcaatcatatttctatttttcataatagctctatttattttgtcaatgtagttgtttctgattttttcttctaacaaatcaagaaatgacagttctctaaactgatctttagtatatcctaatttttcacaagctaaattattaacttccaaaaattctcctataccttcgccttctgaaaacttatttacaaaaatgcagctattaacattattaaagagttctctatacttttcttcactcctcatcagtgatttttcattttcttctctttcaaaagcattcccaataatctctgaacttatctttaataaatataaattgctttcttcccatattttgctttgttttacgctgtcaaagccaataaatccaatgacttttttattactatacattggcagtactaatatagccttaatatcctgagcttccaaaatctctttttctttctctgcttctattggcattaaagaaatatctctaatatttatagccttaccattagtgatttcattcatccaccatggtatagattcaaaaggtatgtcttgaagcgattctatttgagcttctatcgcttcagcacaccattcaaaaatattacttgtagtttgctttttataatcatttacgaagatatatactctgtcagcatcgcttaatttccccatatcttctaatgccttattgataactttcgaatcaaatttttctagaacacaacgtgtagaaatctctagtaatctttcttcaaaatataatttttcatagaactttttttctgctgcttgtctatttttaattaggctgctcattttttaaaatggttcctatgtcaaggacattttgaaaaaggctaggcagctatgagctggtttctgtattgtacaggagccagctttttaagtccccactgatatctataattattataatactccatata

SEQ ID NO: 200 - DNA, 3531 bp, Clostridium beijerinckii
atcttacattattattatagcaaatagtcattacaaaattatgttaaatatgttaattaaatataaacaatttcttaaataaatttaaggattggtaaacaattgaagaaaaaaacaacctgcttaggggagcaggttgaacttataaaggtaaaatacatttaccaatacgggggtaaaataataatgctttaattattttacaattactattataaaatacaaatattaaataattctttattacttattaaattaatgtgaataaattaataatacactacaaaaaaagatgacttactttagggggataagtcatctttgataggagttttataatatgttctagtcactttacaataatattataggataaaattgtaaattgtgtcaatatataaattctataataaaaaataaaaaggataatctgctagggtgcaacaaattatcctgaatactgtgttataaatatttaataggggtaaatatttatgaaaaaaagttttatcaaccttatgtctttattataagtggtatttgtgacagtattatgtcaagttaataaacttaatataaacattttataaagaaaaatcaaataatacaaatatgtttatatgttcctagttaaatttattcatagaaatatatttacctagaaacatagatacaaagaaaaatatatacatatataaatatttataggaagcatgcgggttagaggtgaaatttaaaaatggtttttaaataatagctatcttttgaattattatttatgctaaaattatacataaaaggtatatttataaatggttgtgatataagcaatagagatgttataaaatgagcttaacgggaggaaagaaaatggcttcgaatatagagtttgtagaatatgtatgcgaacagataagtggtgcaggaagaataacgtatagaaaaatgtttggagattacggaatctactgtaatcaaaaaataataggattaatatgtgataatcaattctttttaaagataacaaaaggaggcagaaatttattatgtgaagttatagaagcccctgcttatgaaggagcaaaaccttcctttttaattgaatctttagatgatagagactatttaactgaagttgtatcagcaacctatgaagaattgccaatgcaaaaagttaaaaagaaaataaaagggaaaaaataataggggtgaggagtttgaaaagggcgagagtagcagaaataacagcagaatttaattctaatataaaatcggtttggaatatagtaacaaataataatgactatagttggcgtagtgatattaaaaaaattgaaatttataataatggtaaagaatttattgaatacactcataacgggaatgctacaaagtttattatatccaaaaaggatgaatatagtgagtatgcttttaatatggaaaataaaatgtttactggattttggaaaggtagtttttcagaaaaagaaaatggtggaactaaaatagtatttaaagagaatgtctttattaaaaatccttttatcaggattctttcatatttttttatggatttagggaaaatacaaaatacttatatttcagatttaagaaagaagctgggtgagtaatgaatattagagaacaaataattaaaaaatattttaaatcttggttagagaataattgttcagtattaaaagatatttttgattcaaatgtaagttatagcgaatgttatggtcctgaatatcatggaatagatacagttgaaacatggtttaaagaatggaataaacgtggaaaagtattggcttgggatataaagcagtttattcatcaggggaatatatcagtggttgagtggtattttaaatgtagatatgatggagaaattgaagaatttgatggagtatcgcttattgaatttaatggtgataattatatcgtaagcttaaaagaattccaatctaaaattccacattattatccttatagtaattaaattatggtttatattgataagttacatataaggagaagctatgaaaagttctgaagggcagcttaaaaatagagttgtatacaattatagagtagataaatgaatatactaatttaaatgaagattaattactagaattattgaaattaatctttatttaaattattttttataagttattgacacattcttcctaaaatgctattctaaccatagaataggtgggtggaatgaatatgacacaaattgaggtgatacttttatcacttttatatgataaagattattatggatacgaatttgaaactgtaatagaacaaagaaatatgagagggtggacggatattggattttcgtcaatttataattctttgaataaacttgaaaagaaaggctatattggttccagatatgaaaaagaatatggttcgcctaagagaaaagtatatttcataaaagaagaaaccaaagtgattattaggaaacagattataaaaatgataagcgaatataagaatgaccctagtgaatttgatataggcttattattttcttatttagtgaccaaggaagaatttaaaaaagctttaattaaccataaagaaaatttgaaagatagaaaagaattcttaaataaaagatatgatcagcatcctacagcaaaggagaggccacatataaaagcattgtttgaaagaccaatagcatttatagatactgagatttcttggattgaaaactttattaatgaaaatttttaggtaaagctgattatagtggaggggtgctatatggtgggcaaggaacagtccaaactgctattgcaagtggtactcctattgttggatttgcaatgcagccagaacagcagataaatcttgataatgtagtaatgaaaggtgctggaatacgaataccaattaacagatggaatgcaccaaaaatacaattggctataagaaatataattaaagacacttcctataaagaaaatataaatacattaaaaaaattgttagaatcctcagacggtaagaaaaattcagcgcttgccatatgggattatatacttaataagttaaatcaataaaaatgattggaggataagagaatgagtgatgtgtcatcagttagtaatgcatttaaaacttttatgaaagaggcgccggagtatcaagagatatggatggagacagttcaaaaattagattcagtaagtaaacttgattcgaaaacagaggaacttgcatatattgcagttttagcttcttcaagacttgaaggtggtctgccttttcatgttaaacatgcaaaatctcttggagcaacaagagaagaaataataagcgctgttttaataggattgccagccgtaggtaatatagtaattcaatcattaccaatagcaattaatgcgtatgatggtgaataaatatggagaatttattttagttttaggtattatttttatagaataaaataatattatattaaaataataatatttataaaatattacagac

SEQ ID NO: 201 - DNA, 3467 bp, Clostridium beijerinckii
gatgagatttcccatagcataagctagtaagaccccttgaagactacaaggttgataggtcagaggtgtaagtatggtaacatatttagctgactgatactaataggtcgagggcttgaccaatataatcaagttgtaatatatattaaagaaactatgtgcaattttgaaagagcaaggttttttcaaaggaataattacagtagtagatttatgtaaatgtagtataagcgtaaattaagagtcttttttcaaaggaaactcgactcatattcgtttgctgagtgctaatttacacaaataaggaatacaaatcccaaaagcgatttgcataagttcgttaaaccaaattatagatttgggaactcacttaatctcgtgatgatggcatagaggtaacactccttcccattccgaacaggaaagttaaggtctatagcgccgatggtactgcatgggagactgtgtggcagagtaggacattgcgaggtaataaaaaatatgctcagatgataacttatcatctgagcatattttttattataaagttttttgatttaaaataataattaaagaatccttaaatataaaaattcagatttaaggatttgcaataactacttatacaacgtgtaactaatttttgggacacgactatactggtattaatagagataagcatatatattgaaatttatttctatgcacaattttttatatttagatttcattatctgagactgtttaagaattttctaattatcattaaattgtgattgtgataaattactttagaaggtgagattatgattaaattagtactagtaaggcatggagaaagtctttggaacttagaaaatagatttacgggatggacagatgtggatttgtcagagaatggattaaaggaagcaagaagagcaggaaaaatacttaagaaaaatggttttgtatttgatgtagcttatacatcagttctaaaaagagcgataagaacattatggataatattatatgagatggatttggcatggattcctgtttttaaatcatggagactaaacgagagacattatggagctttacaaggattaaataaagcagaaactgctaaaaaatatggaggagagcaagttcataaatggagaagatttgtaaatgtaaaacctccagaattgactaaagaggataccagataccctgggaatgaatataagtacaaggatttaaatgaagaacaaatacctttaacagaaaaccttgctgatactgaaagacgtgtgttagaggaatggagaggaaatatagctgaagatttgaaagaaggtaaaagagtgataatatctgctcatggaaatacattaagagctttagttaaatatttagacgacattccagctgataatgtagctaatttgaatattccaacaggaatacctttagtatatgaattggatgaaaagttaaagccaattactcattattacctatcagataaggaataagtgataggataagttggtgtaaaatctgaatttaagaaaaaattacaataattataacaaagaaatataatttattgcaaaaacagtaaatcttttaaaattttaaattatatagatttactgtttttgtgattttattcaaattaaatataaaattttgtattttttgtttatatatttctattaatataaagcgtataattacatagttgtggagttcagaattgaaataggatatttttgtgatatcgtattaaatgtttgactaatataaattaatttttactaatatctttaagggggagacattaaatgataataactagaaatttaacaaaaggaaatccggcaaaattgatattgctgtttactattcctttattaataggaaatatatttcaacaattttacaatatagcagatacatttattgttggccgtacaataggcgtaaatgctttagcagcggtaggatgtacaggaagcataatgtttttaattttagggtttgctcaaggtttaacatcgggactttcaatcattactgcgcaaaaatttggtgcagatgataaggaaggggttaagaaaagttacttcacaggcatagttattagcatgataataactataattcttacaactataagtacgattctagctagacctatattagaactaatgaatacacctgtagaaattattgatgatgcatataattttgtagtagtaatatttattggaataatagcatcgatgttttttaattttttttcaaatattattagagccttgggagatagcaaaacgccattaatatacttagtggtagcgtgtattttaaatataattttagaatttgcatttatattaatattcaagatgggagtaactggagcagcttgtgcaactgttatagcacagggagtatcggcgttattgtgtatgtggtacataaagagaaatttgcccatacttaagttaaagaagagtgacttaaagttatccaaagaaacttttttagaacacattaaaatttctctaccaatgggatttcaggcatctataatagcaattggtgctattatattacaatttgcattaaatagccttggggctacttctgtagctgcatatactgccgctcagaaaatagatactctcgctactcaaccgatgatgtcatttggtataacaatggccacatacacagcacaaaattttggtgcggaaaaaattgatagaattaaagaaggcgtaaagaaatgcgtttttatatcagtagcatttagtattatagtgggccttataaatacttttgcaggttattttcttacaggaatttttgttggatatgatcaaaaagaagttattaggttgtcacaaatatatttaacttcaaacggattaaattattttttactttcactactgtttatatatagatatacgcttcaaggattagggcaaagttttattccaacagtagcaggaattatggaattgttgatgaggacgttcgctgcaattatattatcacgaccgttaggttttttaggcgtgtgtatggctaatccattagcatggcttggagcatgtattccacttataagtgcatactatattagcatcaggagaatagatatagaatactcaaaaaagaaaagctgtttgtatgaatcagatatagatgcatgcaattatataagtaagtaaaagttagtttatatagtaactttgtattgtcgtatgatttatgtgataaggaatgaaataggattatttaacaccaataatcttagttcattccttattacattttttgattattttaattgtgtttaaatcgatacatctaatagagtaatttgaaattgaatattgaatttatataatattgttgaaagaattttacaaatatttgaatgtaaaatactgaatatataaaatttgtaatatatatac

SEQ ID NO: 202 - DNA, 3355 bp, Clostridium beijerinckii
tataagagacagataattcactctagaataatacagcactttaatttctttctttaagctatatttaaatttcaagttgcttttaattacatatttcttctaatgctagtatggtgcatgccatatttcatagttttccaaaataaatttaataaacttatatctatttaactaatcaaaagattcattataggttaacttttctcgtaatttaatataccactttatttctagtgctttattaaatttgcacctaattcaaatgctttttgacaatctaaaggaaattgaatttttctatgtgctgctttttcttcttcagagaaggattcaactttatattttgagtaatcatcaaattgataagtattatttgaatacataactaatggttttgtaaatatatgtccaatattagattccatgcgctcaaaagtttttaaataaccaatttgcttcattacctcttctttaacattcattgtataaataaatgctgttggcatcctctttggcgctagtgaagtaccattattgtcatacacaagatagggaaataatagtctttctaaaaatgataggaatttacctgttacattactaaaatatactggagaactaaaaataagtccatcagattgagatactttttctaaaacttcttgaagatcgtcttttaccgcacattttccataactgttacttccaagtcttttacaagcaaagcaacttatacatccagtataatttaaatcatataaattaattatttcagtttcaatttctttatcttttgcagcttcttttactccatctaaagctttttgaagcaatgtagctgtatttttattttttcttggacttccgttaataccataaattttcatagtaacactcctctttctgtatattctcctataatgtttttgttataattaatatagcataggagaaaagatatacaagaatgcagttttttctgtgccagtataaaaagtatactattgaatttgaaggagttgtgattatgagtgattatatgaattataataaagaattccctgctgataatgtatatgaaagaaaatgtcctgttatatatgcactcgatattttaggccagaaatggaaattacctatcttatggtgtctatccaacaaagattttactagatatagtgaattaaaacgaaaagttaaaggtattactaatatgatgcttacaaagtctttaaaagaattagaagaacataagctaattgttagaacccaatatgaaaccattcctccgaaggttgaatattctttgacagaaagaggtaaagccttacttccaacatttaaggaattatacatatggggtgaagagcaacttaaacttgatacgtcaaaatcaaattatgaataatataaaataatgtataatatataaatttacgtaaaaataaatctatatattatccttattattataaatttatatttcatatcttttaaatgcttctcatttactttaatacataatgtaagaattttgaaaactagcatgaaactatttatggctagttataacatctttaatgattattattaagtatttaaagcatagaatattaataaaattattccacaaactataacgctagtaataatcctagtgagtagattccctttcgttaatcaacttaaattacctatttgtgaacgatttaccgaatgtacgaagttagccattgaattttttatattcgtcaattttgcgtttatctttttatccacgaacttcctccctagtattaattaatcattgacaataatttaccattacgaatcgattataacatattttgtaaacatcccattgctcaattttcaaagaataatatttaaaatagctacttcgcattagtagtattgtgtataaaataattcagctacacatgggtgtatattttcataaaaataacaaaataataatagcggaggtaaatgttatgaaaataaagaaattcttgattatatttttaatatatatattcacctttactataattgcagaaatgcatccgtctccaatggctgaagtttcagaacaagaaatataacctatttcagctacttataaacaaggcatctattctctttccttgttagaaggatataaggtcactgctaaacttataactccaaatacaactgttactttaataacagttgatagtaacggtaaacttatacaatttatacacttagatgaaacagatgaaattgtaaaactaggtactcttcataatggggatactgggatagtacttggcaacggagaagtagctatttctccttataaataaactcttaatgtagtggttatactcaatctactcgctacattaagcctatcctttgagaatttctcacatgattaacttataatatctattgtttgttcaattgtactatgaattaattaatttattatcatttatgctatctctatacctaccatattaataatgtttactatcccatttatcacttctttgcttaataatttctactcatattgtgcagtaaaaaaccgcaaattcaatctcttgaataatgcgattttataatttgctatttatttttagtaattcataatttaagaatagtgtaaatcttatatattgaatataaaattaaagcatgaccgtaaaacggaaattaaacttgaatacattttagtttgtttattaaaaaaaataactatactgatagaacatttcatttcttttataccctgattgttcatatagtttttgtgcagtagtattatctattgcagttgataaggttaatccttttgctcctgtttcaaatgcaaactcttttgctttattcattaaacttttacctatacctttctttctcgcactttcttcaacatataaatcatttagtatccatattcttttcatggatactgatgaaaaagatgggtataattgaacaaatcctagaggtattattgagtctttcatgataataaaaattactgattcattatgtatcattcgttcctcaataaatttctttgaagattctaaatttgaatcttgtccataaaatattctatacttattgaataagtttccaaccaactcaaaatcttctaaatcagcttttttaatttttatattttccatattctctctcctctttatactttatgattttatttcgatataactatgcgctagtagtatttcaccataatttactatcatgcattaattatagtatatcttgtaaaaatcgcattattcaattttcaaagaacatttttataatttactacatcaaatctatatat

SEQ ID NO: 203 - DNA, 3190 bp, Clostridium beijerinckii
ctacataaattgtatacttttaatataatcttttataagcctatagtttttaactatttaacatcactttatataattattattatataatatctgcatttatttacaagtttttcatattcttgcatgaatattatgtatgtaacaaattaaaataatacaaggagttaagatggactgaataaagctattacagttattagacaattttaaatttagctataacttcattcagtccatcttttgtaatccaatagcgtcgctttgctcctaatgaagagaagttcaagatattttatatatttcgttatttttagaacctatatatcacgatagtatagtctaaacatttataaaatctgtatatcttgaacttctcattaattgttgtagcctgcggcagcaaggaataaatatattggagcactgtgcgctccttgtggctgcgccactctattagtttagttttatttctacgtgcttaatttaaattatctttatatactaataaatagtttgtacttaattatattttatctatgttcttatgttatagctgttattggtatacctatatacgcattttctaaaggacaagtttattttcttaatagttccttgggtgccgcaatccaccacccaaaaatggacaggtcatacagctacaggcttctaacattgtaaaagtctcctcattactcggagtcttttacaaagtaagaatctgtacgcattagactagtccattgtttgggttcccggtggggcacttcgggatggagattttatgaataaattataattaagtaactatgcagttaaattctttctttaaaatatgtatagaatatttatccatccctctgactggaacttttgtttatggttcttttttaagttcattataatttattttttctggtataggaaaatgtaaagataatgtttagttggccagacaagctgacaagaatttttgggggcttagacatgccatcacaattatataagaaagtattagtaatgtgacggcatgcctatcttgtacaggcttatgtttattactataatgtttgattatatggttttacgctctaaaaatccaatcactaaaaataataaattgtattacagggaaattatttttaatgatacgattttcagagctattatctacttttaattatgtagaaatactaaaaaagccagtccaagaccgcccccattgaaaaactctagaccatacctcttatatatttttttcatataacatggtacatttatttaaaacgtagctcaagacacgcttcgcttttggtcttgacctgccttttaaataaatagataaagtaaatatgaaaaatccatgtgatattatactgcttaggtggacatgctgtttttaatttattggttggacctttaagaatatggcttatattattagctttcacttgggttacttgcgttaagtgcttatccttcttattactttatttatctgatctctagtcgttctagcactcacatattgttatatgtgagctaagaacgtcacgagcctagataagttcaactaaattcagttatagtaaaactataactgaaaagtttcactttatatgggatttcctcccttatgtatttagtatggcagctcctcgcatgataaactttctaatatattttcatgttctgcatttacttgtttataatattcttctcttactttttctatatcatcatttctttcagcttcataatctacaaaactgttatcatcaattctgcctctaaatgacttccaaaattcataatcatcactggttacactgaatattccttttcttcctatattcttgttatagcttaattttaatccataaagacttaagggtgcgccttcatactcaataattattgagccatcttttagtctataagctgtttcagaaaatctgaattctttattttcgcttaaatatctgtactccgctattaatgtttttgattcatattttctcttttccacttttatggccgccttttctttttactccctctactcccatatttttattatgcccactttcagaaattttagacattatttatgtacaaaaaaagcaccttttaggtactttaattatttatattttattctccaatacatagtttcatatatcctcttatcgccttactaacatcttttccatttctgtgacaatatgcttcaaagtcttcatataacttgatttcacattctacatggagttgctttgttggtggttttacttttttaattttatttctattttccattattattccactccttctctgtaaaatattctagccaacaatcaaatttcttatacttaaatggctaaaaatatatacaaataagtacaagtatctacgaatatttgttcgtattattggcaataattatagtataaggttaagagaggatttgagaaagatatgagaaatttcacatttacaaaatggcttactactaaagaagcttttaattcctacggacactataaagaatggctttctatcttatcaaaagaggaatctaaaaaaactgatttatattatcacgaaaaatatcaatattttataaattacctacagactgaatgggattagagaaatatacatctctatcccccattaaaaatatctatatgagaggattcgatctaatgacatttacaacatggcttataaaagaaaaaggctttgtatcaaaagctcaatttgattcacttgtaaatacactaccatatgagggcagaagaaaattaatcacatactataaaatagaatatgaacattaccttgatacaagaccaatgcagttagaacttgaaataaaataataaacctgaagaggtattcttcaggtttatttcattctatttaatatagcacaaactacagaattaattaccaaaattataggacaagcctctgttgtttttgtggcaaatactaaagctccatagaaaataaatattgtacaggggtgagcgtagcgaatttcccctttaaaatatttattttctattggtataattgctctcccaaaaaacattattttagataagttccattactataatcttaaaatccaacttttctttattcaacgctatatccatttattgaaattattttt

SEQ ID NO: 204 - DNA, 3170 bp, Clostridium beijerinckii
caagttgatatagatgcagctatattaatagaagcagaagactttggaaagtgctttgcaacagaagatcaaacagaaggaatgactgcgttcttagaaagaagagcagaaaagaattttcaaaataaataatttagttaaaaatctattagagatttatatatagtttgtatcaaataggtttaattaacaaggagggtaatttaatgaatttccaattaactagagaacaacaattagtacaacaaatggttagagaattcgcagtaaatgaagttaagccaatagctgctgaaatcgacgaatcagaaagattccctatggaaaacgttgaaaaaatggctaagcttaaaatgatgggtatcccattttctaaagaatttggtggagcaggcggagatgttctttcatatataatagctgtggaagaattatcaaaagtttgtggtactacaggagttattctttcagcgcatacatcattatgtgcatcagtaattaatgaaaatggaactaacgaacaaagagcaaaatatttgccagatctttgtagtggtaagaaaatcggtgctttcggattaacagaaccaggcgctggtacagatgctgcaggacaacaaacaactgctgtattagaaggagaccattatgtattaaatggttcaaaaatcttcataacaaatggtggagttgctgaaactttcataatatttgctatgactgataagagtcaaggaacaaaaggaatttctgcattcatagtagaaaagtcattcccaggattctcaataggaaaattagaaaacaagatggggatcagagcatcttcaactactgagttagttatggaaaactgcatagtaccaaaagaaaacctacttagcaaagaaggtaagggatttggtatagcaatgaaaactcttgatggaggaagaattggtatagctgctcaagctttaggtattgcagaaggagcttttgaagaagctgttaactatatgaaagaaagaaaacagtttaataaaccattatcagcattccaaggattacaatggtatatagctgaaatggatgttaaaatccaagctgctaaatacttagtatacctagctgcaacaaagaagcaagctggtgagccttactcagtggatgctgcaagagctaaattatttgctgcagatgttgcaatggaagttacaactaaagcagttcaaatctttggtggatatggttacactaaagaatacccagtagaaagaatgatgagagatgctaaaatatgcgaaatctacgaaggaacttcagaagttcaaaagatggttatcgcaggaagcattttaagataggaggacttttagaatgaatatagtagtttgtgtaaaacaagttccagatactacagcagtaaaaattgatcctaaaactggtacattaataagagatggtgttccatcaataatgaatccagaggataaacacgctttagaaggtgcattacaattaaaagaaaaagttggaggaaaagttactgtaataagtatgggacttccaatggctaaagcggttttaagagaagcattatgtatgggagctgatgaagctgtcctattaacagatagagcacttgggggagcagatacattagcaacttcaaaggcacttgcaggagtaatagctaaattagattatgatttggtatttgctggaagacaagcgattgatggagatactgcacaagtaggaccagaaatagcagaacatttaaacattcctcaagtaacttacgttcaagacgttaaagttgaaggaaatacattaatagtaaatagagcactagaagatggacatcaagtagtagaagttaaaactccatgtctattaactgcaatcgaagaattaaatgaaactagatatatgaatgttgtagatatattcgaaacttcagatgatgaaatcaaagttatgagcgcagctgatatagatgtagatgtagctgaattagggcttaaaggctcacctacaaaggttaagaagtcaatgactaaggaagttaaaggtgcaggagaaatagtaagagaagcacctaaaaatgcagcatactatgttgtaggaaaattaaaagaaaaacactacatctaagataataggagggtaatttattatgaatatagcagattacaaaggcgtttgggtctttgctgaacaaagagaaggcgaattacaaaaagtatctttagaactacttggtgaaggtagaagaattgctgatgaattaggagtaaatcttacagctttattattaggtagcaacatagaaggattagcaaaaactttagcagagcacggtgcagatgaagttttagttgctgatgataaaaacttagaacactatacaactgatgcttacacaaaagttatttgtgatttagcaaatgaaagaaaaccaggaatattattcgtaggagctactttcatcggaagagatttaggtccaagaatagctgctagattatcaacaggattaacagcagactgtacatcaattgacgttgatgttacaaatggcgatcttttagctacaagaccagcatttggtggtaacctaatggctacaattgcttgtccagaacatagaccacaaatggcaacagtaagaccaggagtatttgcaaagattacaactgatccatctaaatgtaaaattgaaaaagttgatgttaaattagaagatagcgatgtaagaactaaagttttagaaactataaaagctaagaaagatatcgttgatatagctgaagcagatttcattgtatcaggtggtagaggagttggaaacaaagaaaacttccaattacttaaagaattagcagaagctctaggcggaactgtggctggatcaagagcagctgtagaaaaaggatggattgatggagcatatcaagtaggtcaaactggtaagactgttagacctcaaatatatatagcttgtggtatttctggagctatccaacacgttgctggtatgcaagattcagatttaatcattgctgtaaataaagatgattcagctccaataatgaaaattgctgactatgcaatagttggtgatcttactaaagtagtaccagaattaatagctcaagttaaagaaataaagagcgctgaataat

SEQ ID NO: 205 - DNA, 3084 bp, Clostridium beijerinckii
catataaattcactcctaagtgcaagggtttttaccctatatttaaaatatctatgcacttagtattccataaaatatcatacataatactattccaaacacttaagccaatttggagcagcccctaaataattaatattgtatttcaaatatttggagatttgctggcttaaaccgaaaaggagcatcgctcctgattaaaatttaatcattttgcgacactcccctcttattacaattacttttcaaaaaatccttttacaatcacttctccattctccatcattttctttccatttgcaaaaaccatttctatatctaaagatttttcatccactatcactaaatctgcatcttttcctaacccaattgctcctttattagctaatttcatgattgaagcaacgttcgatgttactactttaatagcgtcttcaattggcacattttgttcagtaattgcatatttaatttccctgtataatgttgaaactgagcaaatttcatatccttctaactttccgtccttatcaaatttctccatgcttccatttccatctgaagtgaaagttatatgatctataggtaatttttcatctaagtatttttttaatccttcaccagctctaagttcaccttctcctaaattctctaggtcacagctggttgttaaatcaatgaaaccacctcttttaacatactctaaaccttccttaaatagcttaccgtttctattgatatgagtcggcaataactgagtctcaggaatttctgtcttatctagtaattcaaataaataatttaatttcctgtttccttcacctaaatgtatgttaacaattccacacttatttgatagaagacctccaactctactttctgctactgcatttgcaaatacttcaaaggtttgctgagaacttctatgatctgaaatagctatttcccctattccgattatttcttcaatcaacattaaatcgcttttaattgagtctgttacagtcttaacaggcaactcatatgaaccagtaaaacagtatgcagacatgccatcttgttttagtgctttcgcctttgctatcaatgatttcatacttctgcatgttccatctgttcctatacatcctacaaccgtggttattcctgccttaaccaagctagataatggcatttcaggagttcttgtgttatatccaccttcgcctccagcacctataatgtgaacatgaccgtctataaaccctgggaaaagtaatttatttcttccatcaataacctcaacatctatgggagcaattttaatattaagattttcatatataccttctattttgcccccggctatcacaacatcttttattccaaggtgtttaggtgcatacacgttacatcctttaattattgaaatcatattctcacctatcctttatttaaataaatactctaaatcatcacatctaataataaaatgccgattatgtgattatcttttcctaatagatatattaatatgacagtaatttacttttaaattaagaagaataagtaatttctaatttgaaacttatttcttattccttaagtatattttttatattattattagcatacattgaatctggataattatttattagtatacttgcatactgcttactcttatccatatttatagaactgtttagtaatgccagatcatagagtgattcctctacatatacaccattaggatactgactataatattcctcatattgtcttattgctgcagagttgtcagataactttgaagagctgcttgctctataaaacaatatatgttcttttaaactattcccttcacagtatgcatacgctttatctaaaaaagctttagcatctgaatatttattttcattaaaactctttaatccattttcataaaatcttgaaaccccttgattttttattaaatcaacagcttgcttatatacttcttgatcatcactagttatagactcctgtttaatatcctttatttgttcatatataccatctaaatcattggtatttattaatgctatcatcttatctttattaaagttaatattattattattatgttcatcttttacttcttcttttaatatctccggagcggattctgtattatcctttacctcatatgtatcagcttctttattaatatcactttcatctttcgttgtttcttcaacggtattatttaaactcttatattttgatacagctgcatatccacccactacaatagcgaccactataaccataattattattccaaataacccttttgaggaatttctttcctctataaatgttccactgtctttcaattctttctcgattttttttgctgtaattgcattcttatcgatatttagtactttctctgcatattctcttgctctgtagaaatcacctttcctttgatagcacatagcaattccagtattcaccttaatggcattaaagtcactttctgaacatctcataaatatatttaatgccttatcaacctttaactgctttaatgcttgttctccctgcctaaataactctaatctctttctatctaaaatagaatcatttatgtaactttttgcaatatcatcattatttaaatcactattcatcttccatactgtaactgcttcgtctaaattacccttttgatatagtaagagccctttaaagttcaatacatttgggttatctaaaccttctagtaatatatcttcacatatttctaaagctttatctatttgtcctatctcatagtaactcatagctttatcatgagcccttttaacctttttattcataaaattcccctttgtaattcttaatgcaatatgttctatcagttcataatatatattatatcgcactcaattataataattaagtataaaaattaaagctacctcaattaattaaaatggaacctatgaaatagacactaaaaaaagactatttcaataggttctttttttgtacaataaaagataagaagaaatatagtaaggttgtgaaaagaatgagtaaaaaattattttcaga

SEQ ID NO: 206 - DNA, 2666 bp, Clostridium beijerinckii
cctgagaaagtttataccaataggtaagaatttgaagttatctccatcttttcccctggttcacaccgtacatgagactttcacctcatacggcgttccaacaatttatacttttttaattaaataactgaatttcctactaactttcttaaagaattgactcgttttaaccctttttcgtccaaggacaataaacctagatatttagttatggtatatttttcattgcaatgtacaagaacatgagcttcggcgcatagccaaacaagatttttatactcatctgttccaccattacttttcggtatcttatgatggcattccatattatcagtttctaagtctagacctgttatgtaacatttacctttttgtcctgctatcagagatagcatattatcacagagttcagcagttccagtataattcgaagattttaaaagatatttgattaaatgataatatcctttaagtctgtcatgaattaacaatcgacctctttcagtataattacatatattttgattaaaattattaggtggtctggtcttacaaccataaatagggaagatagtgacgttataaatagtacgtatcttaccattataatttccatataaccgtttatatgtttcagaaaatttaggtttatttgatatccaattctttaatcgcatttctaaggttcctgtaactaagaaactaattttctttacatctttacttatataggtagcaatattatagtagttatgaatacctagtatcattgagtttaagattgatacttcattactattttcttgcttttggattttctttatttggtctttaagtttattaatggcattatttttagatttatcacacattcgactttgacaaacatatttatttcttttaggcttaaccataagtttaaatcctagaaattctgtatagttttttcttaaatttgttattttagatttgtcaggacttatatctaagtccaatctttcttttaaccacaatcttgtagcattataaatcttctgtgcagttttaaaatctttgcaaaagattttaaagtcatcagcatatctaactagacgtatttcttttaaattacttgttttcatggctttatatttgtgtgattgttgggtatatttatatcttgtttcaaatgtttcccattgagaactaatccaccagtccaattcatttagaactatattagataataaaggactaattatacccccttgtggtgttccttttgttggtattccaattccttgtatttctgattttagtattttaccaattatacaaatcaagtttttatcatgtatgccaatgttccatagctgtttttttagtttgctatgattgacattatcaaagaatccctttatatcgatatctactacataatatgcgttactaaaattcattatttgcatacatctagcaatagcatgttttgttgacctattaggtctaaatccataactatgcttataaaatttagcttcacatatgggttctaaaacttgcttaatacattgttggagaattctatcttcaatacagggtatacctagcggtctggttttaccattttgtttaggtatttcaactcgtctcacactttttggaatataattatcgaatttattttggatacgttcaataaacttttttgtttccatgtttttaaagtaatttatattaagattatcggttccaactgttgttgaacctttattttttttaatgtttctatatgctagtaagatattattgtcagatgttatatgtttcattaaattaatgaaatttttattattgcaagattgtttatacaaattgtcaaattcattttgcattgcgtaatattcattatttcttagtaactgtcgtttctctaattttaagctttcctccaagtctgttgcctcctcatttgtataaatacaaatttagattaacatctcttagtcttactcgaaccttgaattattcagtatttaattatcaaataacaattgtctagtggctattgcataaattactattgctgtaattattatagcttcatgccaccactttcacttggattaagataagttatagaacttcttttccttatcactacttcatgggcagtaaaacctccatattccaagcttaccttgttccgttattactatctttgcatatatccttaggtcgttagtataagcctgcaagcttgatagtacctgtaatactatatggattttcataccaagaatttttactcatccacacttgcaacacatatgtgttatatccatttctagatattcctactttagacatgtacattcccaacttcgtcagctactttagtagcatcctaaccatagatattttatagacacccgacctatcaccactcaactacctctagtttgcatttcgtgtagaaagaaattctctacttacgatggctctcagccgacttcaccgagcttttaaccttctgctatttacttagcaaaacgctaatcggagtatcagtgtaaacccttcgggacgttactccgtcatttggtttctcataataacagttctaatttatgaatttaatcatttaattaggctattcttttcaaatagcaacaagtcgcactctt

SEQ ID NO: 207 - DNA, 2653 bp, Clostridium beijerinckii
gaaataatttatattatatttttagataataaactatgcttttaataaaactttttggttcgcacaagatgataatttacagtaaattttaatcaatttaactttttagaacacatataataataattttcttatagtttgttatgaaaaaatactataaatcatagtaaattacaacaataaagattatctacaataagtcaaacataaaaaagtcgtaaaaattgaataaatcgaaagataataggatataaattgagataattaaaatctagtggtttaaaaataaaaaattagaagtgttgctaatgaatacctaatacagtataatagtacggtagtaaaaatactatatattgtgccatggagggaataataatgctatatgttgtgaaacgcgatggaagagaagttgaatttaattcagataagatagctcaagcaattaaaggatcagctagtgaaatcggtttaaatttaaaagaaagtcaagttctagatactgtacataaggtgattacttatatagaagaagagtataagaagactataactgtagaacaaatacaaaattttgtagagaaagcattaagaaatgagggacacaaagatatagcagtcgcttattcagcatacagacgtgaaagaactaaagtcagagatataaaatcagatttaatgaaggctataagacaaattggagttgaaactgatagagataatgcaaatgtaggaaataatttcagttctaagttattaagaatagcatctgaatcaaataagtggaatacactagctactatgccaaagaatttggcaaaggctcatgagaatggtgatttatattatcatgacttagatagctataatttaactgtaaactgcttgcatataccaacaaaagagatattagagaatggatttaatactggatatggaacaattaatgctcctaagagaattgaaactgctgctgaattatcatgtatattattgcaatcaactcaaaatgatatgtttggtggtcaatctcatccggattttgataatgacatgggtatatttgtagagccaactagagaagaaattagagaagaattattggaactaggtgtatcagaagaaaagttagaagctatggtagaaaagaaagtaagaaaaaaggtacaacaagcaatgcaaggtgtagtttataatcttaatacaatgcattctagagcgggatctcaagtaccatttagttcaattaatattggtttacctacaagctcagatgcagcattagtatgtgaagtttttcttttagaatatgaaaaaggattaggtaaaggtgaacaaccaatttttcctaacataatttttagagttaagtcaggtgttaatagggaagagaatgatgaatatttttatttatacaaactagcatgtagagtagctgcaaagagaatgaatccaacttttatgaatattgatgcagattttaataaggaatattacgataaaggttatgttccagctacaatgggatgtagaacttatcttatgaaaaatgtaaatggtgagcctggttgtaagggaagagggaatatagcaccaacaactcttaatcttccaagaatagggttgcaagctaaaaatgatataaataagtttttcagtatattagatgcaagattagaattagcaaaagattctttaatgcatagatatgagattttgaaaaatctaaaagttaaggatttaccttttgttgcaggtcaaggacttatgaagggttcagaaggcttaaaacctgatgattctatagaaccaatattaaagcaaggaacttggggaataggattcataggtgttgcagaagcattattagctttggttgggaagcatcatggtgaagatgaagaagcaagaaaattgggaataaagattgttgaacatataagacaatattgcgataggcttacagaggaatataaactaaattggagttgttatgcgactccagcagaagggctttcaggtaaatttataaagcaagatcaaaagatatttggattaataaaaggagtaactgataaggaatattacacaaatagttatcatatacctgtttcgtacccaatatctattaaagataagattgatattgaagcaccataccataaactttgtaatggtggacatataagttatattgaagtagatgacacaccagatgcagaaacaataatggatataataaattatgcatatagaaatactaatatcagttatatgggtattaattttcatataagatattgtagagaatgtggtacttatcttcaaaacaatgaaaacaagtgtcctaaatgtggcagtcagaatattcaaggaatatcaagagttacaggatatttaagtttagatgaaagattcggtgctggaaagtatcatgaaagagaagatagaatatcacatactgagagacatgggcatcactactaaaagcataatgatgatagatttttaatttataaattataatatagaaaaagaagatggatttattaatctcatcttttttttctatatttaattcatcagatgttatattggcttataaggcaatatgaaacaaataattttatgaggaatgagttatataatacag

SEQ ID NO: 208 - DNA, 2589 bp, Clostridium beijerinckii
ataccgctacttatatttcaaagacagtatttccttagtcatcagttttaatattaatccaagaaggtataagttacttgaaatttaatttcctatgatttatactcatgttaatacctagagatatctctaggtcaagcttttttcaataaattttaaaggggattttaaaattgacttatacaataaaagatatatcaaaaatgtttggaatttctatatatacaattcgtttttatgacaaagaaggacttctaccatttgtcatgagaaataagtctggaaacagagtttttactgaatcagacgtaagtctgtttagaacaatttgctgtctaaagaatactggcatgcaacttaaggatataaaaaagtatattgatttctgcatggaaggtactagcaccatagattcacgaaaagaattacttttagaacatcaagaagtaattttaaatcaaataaatgaactcaatgaaaatttagaccttattcattttaaaatagaaaggtattcatctcctgactcagtccaaattattaacgaagaaaggaaaaaattttatgatgaaaaacgtaaaaataacttgttatagtaatcaaacttgttccacttaaacctcttgcttcctctaaatatttacatatgtactataaaacagttttaatagtacatatttatatttgaaactattctcctataaacatataataagttataaaatgattcatatgtaaatctattataattcttcataaaaattataatagatgaaatattcaatgttaagtttattaattcttctaaagaaacaatctccctgcacatactgtatattcataataactatctactcccttaagttttaactaaattataataaaattattatttgccaaaatacttttaatatgtataacaataaattgatacacttaacgtcagcatcagaagtcatatttcaagcaatactcatttatgtgctctttttaatggagtaggtagttttttataaagagtatgtcgatataatctccattgaggagtagaagcatcgtctccaaagaattataaatagccttaaacattttatatcaatgtttaaggctatctatagcatttattttatatatcatttagtaaaactctctatcgaaagtaatgatactcctataagaaggattaatactatatatgatatcttgtatttgagcttgtagctcctttttttcactatctttaaaactagtcttgtccaataccacatcaaataatatagttttttcttcactttttccaacaactctaaaatcatgcatagataatataccttttattactttaatcttttcataaactacttcttttaaggctgtaatctcagggctgtctgtattaattggatccatatgaattgaaagatatacattcattcgtttaccaatttccttctcggccttatctataatatcatgcagttccataatcgatatattacttggaacctcagcatgcaaagaagccatatatctacctggtccataattatgaattacaagatcatgtactccgcatatatatttataacttattacgctgctttttagctcttctacaaattccttttctggtgcttttccaattatagtaccaagcatttctcttccaagttctatacctgaatggagaataaagagagatacaattaatcctatatatccatcaataggaaaagttgtaaactttgtaataagtaaagaaaatgtaaccatagatagaactaagatatcagtaaatgattctaatgctgatgctttgagtgcagaggaatcaataacattacctatataatttgtaaatctattaagaaaaatttgcaatggtattgcacacagcatgcaaataaaacttactttatcaaaaggtatagttacaggatgtaaaacacgtaaaaacgagcttcttagaaattcaaatcctactacaagtatggcaccagaaaataaaagtgcagttatatactctattcttccatagccaaaaggatgtttatcatctgccggacgatttgcaagtttaaaactaaatattgtaactaacgaagataatgcatctgttagattatgaaaagcatctgccgtaatggctatactgtttagaaataaaccaataacaatttctagaataagaatagaagaatttattattatcccaacatttcctccaagagtcccgtaggattgccttactgattgggaacttacatttttgtggtctttaacaaattttcttattaaaaaatcaaaaatagacttcatatatttcgccttccaccgttttatcttatttattccacgtatgtttatatacgcgtttaatcaataaattaacaccataaactaactcaataattcagcgtattattaagtattataccataaaattccttatacagcataatgggagtgtcgcaaaatgattaaattttaatcaggagcgatgctccttttcggtttaagccagcaaatctccaaatatttgaaatacaatattaattatttaaagaattctgatttttaagcacacta

SEQ ID NO: 209 - DNA, 2569 bp, Clostridium beijerinckii
gtaagcgtcaaagaatcgacgcgtagcgatagcgcaatttaagtgataaaatatacccaacagaaaggtttaaattctctgttaggtatatttttatatgtaaataattatttggtagtcttgacacgcagttgatctggaatgttttccgaccatggcatacatttttctagtatgtccctttctttaatttccgaacttgctaacacttcaaataaatatactaaatacttttcagttgctaagccattggctttagccgtttcaataatactataaagaagtgcgcttgacgatgcgccttttgaagtcttggaaaacatccaattttttctgccaattacaaatggctttatagctctttcggctgcattattatcaatttcaagacatccgttcgttaagaaagttctcatatatggcaataacttttgcgcatatgcaagagctttacctaaaggacttttaggaagagcatcaacaatttcactatctacatattcttgaaattttttaaggatagggtcagatttcttgagccttattatatgtctatcagcataataatcatcactccccatgtattgttcccttagctctttttcaatttcataaagttgctcacaataattaaacccttctaatgcatgtgattgctttaaagcttcagggcttaatgatgatattatttcaaagaattttcttcgaatatgagccatgcaatataatctttttatatttttaaccttattatagccatcatatccatctgtttgaagatagcctgagaatccttcaagaaattcttctgcacaagatccagatcttgttttttgataatcatatagaattactggattttcaatgcctccggagcgatataaccacatgaatctttttgagttagaatcttttccgttttcttcaataaccttcagatatgtttcatcggcatgtatataatttctttttaagagctcctctttcatatagttaaaaacaggcttaagctcagttgcacaacttattatccaattagataatgtctgtcttgaaagattaacatccatcatcttaaaatatgattccattctatataacggcattgcatattgatatttcatgctcacaacatgagctaataattcatttgaagccatacttttatataagaatgtatttggtatttttgctgaaattatattgactttatctgcatccgcttcgcaatttttgcatgcatatgtatatgaaatatgttcctctatgtaaagttctgctggcttatactttaaaatctcttttgattttttgcctattacaactaaattatttccgcatttatcgcaaactgcttcggaatcattaattttatgctcaattatgactctatctaggccggataagttatcttttttccctgaatgagaagatgatttctttcttttatatgtaatttcttcaatggtaggttcctctatttttagatcactgtttttttcagcatcattaaaaagagatatctgtcttgaatcaacttgctcactagattgtccaaaaatttttctgtttttattaagaagttgtcctttaagaaaagctaattccttttttaaattatcaatttctttatcttttgattgaatttgttcttccattttagaaatcaataattttgttttttcatcgagctgattctctaaatctaaaatatccatttttatacctcacaacaaatataggcatatattaccacaaagcccttaattccgaaacttgtaaaagttcaaaattaagggcttatagcaatatttgctttaaaagctgtttcttacttcaattggcttaaatttagacttagttctaacttcatatcccataagcagccatttcaattcttctttgttaatcttaagagcttcgtctggagtcatcggccatttcaatttactattttcaagtcgaaaataatatagccagaatccttcatcaaagtggaggattttaattctattcatttgcctattacaaaaaacaaacaaggctttttcaaacggatccagctttagctgcgtttgcacgataactactagtccatcaatgctttttcgcaaatctgttataccacatgcaagataaactgtattaactttattaagattgaacatttgtaatcagatccttaagtaaattacttaaaatagctatttcattagccggtacatgtactttagctactcctatttctattattatattagatctatcagcttgaactacagtaatctcagttcttactcttttttctttcatagaaattgcatgaaactgtaaattattattttcattattaagcttctttttatagtaatagaattgacttttagtaatgtgatttgaattgcagaaatttcctaacgttccttcgtaagaagaaaagccagcaactatttctctccaatttatattttcattattattcatatagataaacctccattgttaaaatctatgctaattttaacaatggaggattgcattttctatccgttaatttttttacgcttac

SEQ ID NO: 210 - DNA, 2539 bp, Clostridium beijerinckii
agtgtgcttaaaaatcagaattctttaaataattaatattgtatttcaaatatttggagatttgctggcttaaaccgaaaaggagcatcgctcctgattaaaatttaatcattttgcgacactcccttttataaaatcacatccataataatcttatatcaatcccaaatcaatatctccttatttagaatttaattatgcatccattctcataagttaaaagatttccttacaaaaattgagctttctaaatatatgttatacacaatatcccaattctacttttctttcttaactctataaactagaaatattccataacaaactaaaataagcgctattaatatcttaatatcaaatatattttctcctaatattaatgctgataacaatgttccaaataccggtattaaaaaattaaatactgatattaatcctactttgttatattttaataattgcgtccaaacagcaaaggctattgatgatagtaatgccatatatataagtagtaatgttgatttcgctgtaaatccttctaagctacctcctaatgcaaatcctaatgcagtaagaagaattcctcctataaatagctgaaaaccagttactatcgaaggttcttgagtttgcgttatcttcttcccatatattgcagacacagcaaatattattgcagcaatcattataaacccctcacctttaaaagtgacagatgttcctcctaatgattctccatttaaattaacaattactactcctataaatccaataacgcatcctattatcttatttaaatttaacctatcattcttatatataaaatgagctagaattatacttacaaaagttcctgttccatttattatagatcctctaacccctgtagtatatgacattcccacatagaagaatatatattgaagtgcagtttgagttaaacctaataaagttatctgaccaaattgctttctagtaaatttaaatataactctttttgatataagctcaaatatgagtataaaaatacctgcaagtgtaaacctatatccggcaaaaattaatttagagcctacatcacttatattaaatagtgaatatccaacttttatagccggatatgcacttccccataaaaagcaacacaatgttgctaaaagtacaatattttttctgttagtataaacttttacttcatccattttatatgtttctctctcccgcctaatcattgtaagtagttcatccaatcactttttattccgcattcattctaattctatctaatacttccataactcgaattgattcatttaaagttaaataatcactttcaagcttcgactcttttaaacagttatgaacttctttaatctctgcatacatgtcatcaaattctatatctttttcaattgtatacgacttgcccgaatttagattaacaacagctttgtttggtctattatacatcggaatctccatccatccctttgttcctctaataatagctgtcctttctttatttctatcaattgccccttctacagttcctattactccatcttcaaaagaaagtattgctttaaaataggaatcgactcctgattcatttatatccatgtaagatttgacacttttaacctgtgaatcgatcatatccattacaaatgacaatggataaattcctacatctagtaacgccccaccttggtctttatctaataaatacgatcccggtttaatgttttctacattattgcaaaaattagcttctatagccgttatatctccaatctctttatttcttatcattctcttaatatcactaattatcggaacaaaccttgtcttcattgcttccataaagaatgtattatttaacacagcttctttttttatttccttcatttcttccgaatttatccctacaggcttctcacaaagcacagcctttttatgctttaaagcttcgatggaccagtgtttatgaaagccgtgaggcaatgctatatatacagcatccacttcttcatctcttaataattcattataattttcataaactttctcgcaattatacttatcataaaattcatcacgtttttccttagttctagatgctatagcatatagtttaccttcattagaatatgataaactctttgcaaatctcaaagctatatttccaagtcctataattccccatctaatcattacttttcctccttattataaacctgcaattttattcatctttatttattaaaaatactattctatattactatatcatactctccattcatacacgctaatcgctagtacaaaaatatccacaatacttagaacatattaaataattattagtatgcaatcatatatttcttcctataaaaaatttgtaagcagaaaagggagtgtcgcaaaatgattaaattttaatcaggagcgatgctccttttcggtttaagccagcaaatctccaaatatttgaaatacaatattaattatttaaagaattctgatttttaagcacact

SEQ ID NO: 211 - DNA, 2525 bp, Clostridium beijerinckii
catatatatatattaatgattcttgttttagatgttataacttgttattatatattatagtacttattatttagatttaaagttataatttaagtataattcataatggaggtaaaaaagatatatatggaacttccaaagattaaaattaatgattttgaaggcccgtttgatcttctattgcatttaataagaaagaatcaaatgagtatatataatgtaaaaatatatgaaataactaatcagtatctgaattatattaatgaaatgaaaaagatggatttagaaataacttctgagtttattgtagtagcggctaccttaatagaaattaaatctaagaatttgttgccgaagcttaaaaaacaagaagatgatgaagaagatgatgagaaaaagcttttagaaaaacttattctttataagaaaataaaaggggtttcagtatttttaaaagacagatatactagtgctggcgagatatatggaaagaaaccagaggtaatagaagaaaaaagagatgatactgataaaaaagatttattaaaaaatataagtcttatagaattgtttaatatatataataatttacttgagatatataataataagcaaaatagaaataacataattcagaaaaaaatatatatggataaatataaaatagaagataagttagaatatattatggacaagttaaaaacagagaaggtaagcagctttcacaagattatcgaaaattgtgaatgcaaattagagtgtgttgtgacatttttggcattgctagagatgattaaacagaggatgatcaaagtatatcaaagcgaaaattttagcaatatattgattgaaaggagaacagatgatgagtaatgataaagggattcaaattccatttatagatgacaagaaaaaaaattctttaaaatcagcaatagaatctttactatttgctagtggtgaaccattaagtttgcaggatttggttaaccatcttgaagaaaaaaataaacttattgaaattatcatacatgaaatgatggaagaatatgaaaatgataatagaggaataaaaataatatgtattaaaggaagttaccagttagttacgaaagctgaaaactctgattatatacagaagcttttgaagaaaaacaaaagacaatctttatcacaagcatctatagagagtttagccataattgcttataagcagcctataacaagaattgatattgatgaaattagaggagttaaatcagagagtgctctccaaaggcttttagaaaaagatcttataaaagaggttggcagactagaagtgcctggtagaccaatcttatatggaacaacagatgaatttttaagacaatttgaattgaaagatttaaaagaacttccttctctagatttatttgggcaagaagatgttcaggaagatcatggacaggaataaaatttaaggatatatcatcggaatttataaatatattaatacttgaaattttgaaaaacaataaaatctatttttagatattttatatttattttattaaatttaagagagaaatagtgtattattaaataactatttctctcttgaattaaaaattaggagcaatttaaatattatcgctatcactgcaataacattcttcggaattattatcaacagtagtagtattgacagtagcagattttttattctttccacatatatcttttactaaactttttgcaatatctaagatttgaggaactgtatccacaattctatcatatgtagtatcttgatctacaggtagcattctaacaccatcttgtttaacaactaggaatgctacaggtttaacagaaacccctgctccggagccgcctccaaaaggaaatgttgtgcttgtgatattttgctttaaatttagacattcacttccaccagaagcaaatccaaagcttaatcttgaaacaggaacgatataagctccatcttttgtttctatggctttccctattactgtgtttacatcaatcatatccttaagattttccatggtacttttcattaagttttctacatgttgttcacttgacataataaatcccctttattaaggggtcacctcccttgtttatcgttattttttaataaattaattattatatatataatgtttgcaagtgataagaaaattatacttgaagtttcaatttttagtaaaaaattatcatcaaatacaggagttattttaaaattaaatttctttatattaaaaaggtaattaaggagaatgtaagttaatgatgttgtattatatatgactccatagaaaattgcagttctcgcagcatcgtttagtgagtattccatagataaatttatttttaacagtggcctatattttaaattatttaaagtagaaatcagatgcttgaaatttattttactattaatttttgaaaaaaatttatgcttacttttaattaaaggtgaatttttgagtttttttatacgtgttattcttttc

SEQ ID NO: 212 - DNA, 2448 bp, Clostridium beijerinckii
atataattaaatacattactgaatagctttttaatctgcctagaaatcttaattattaataagttttcttttaagtatttaattactccaaaatttattatgctttttaataacatgacacctgcaaatataatataaatagctgccatccacataattatatttactgaaattactgtataactttcaaggtttttatccattcttgagccaattaaatttatagcaaatctatttcttaaagtttctgttaccgtaagtcctaatacagttccaatgacaattccacctgctccaaaaataaagcaattaatctcaaaaggaattttcgagaaatatttaactccaaatacttccttaccatttttataaggaattagtaaactaagtattaatataatacttactattcctaagaggatagctaccacagatgcaatattcattttattttgtgattcatctatccttctgcttaaggcatctgtatatttaaggtctttaggaattccataaatgaaagttacattcttaataggattaaatttaacattctcttcattactacgaggatatccccaaatttctcttatatttaggcctgaaaatgcattttttacgatatttgcatcagcaccataaacattacttattgacattaatccagtgttatcatattttacggtcatgtaccacgaatatttattctttaaattattaacttcactatcagatattaattcctttaaatcattatttgtatttgtaatatttgcatcatcactatacactaaataatcaagatttttatagttattattcaaattatttttccactcactcagttcatagttaaaatttcgaatagtattttcctcagtatcattatgtgtatcataggatgatatataaattttatcacctgataactcttcatggtttgtctgtcctacaagatctttatataaaacataatcatttttataaatagttcttaagaactcatcttcttcaaatggagatttaggctccgcttttgcccattccctcatgttaggataaatactaaatattcctactgacattattaaaaatataataaatgttactaaatttgtaacatatgattttttactgtttttcaattttgtatccaactccccataccacctttaaatattttggattctttgtatcaatctctattttttctcttatattcctaacgtgaaccattactgtatcagtatttatggcttcctcattccacactttttcatatatttcttctgctgaaaaaactcttcctggatttttcattaacaattgtaatattttaaattctattggtgtaacttttattaattctccatcaagaatcacttcttttgtatcattgtttaactctagaccaccaattgaaaatacattacttttttgttcagctccacttacaacacttaaatattttgaatatcttctaagctgggaattgactctagctatcaactccattggattaaatggcttagttacatagtcatccgctccaatattaaggcctagaattttatccatctcctctgattttgcagtaagcattattacaggaaaatcataattctcacggagtttcatcaccattgttattccatccatcttcggcatcattatgtcaactattgccaaatgcaaagtttgattttctattatctccaatccttctattccattgcttgctctataaacattgtagccttggtttttcaagtatatctctattccatcacatatttctttttcatcttcaactattaaaacattataaaaattcattattctttaacaccctcacttactataatttacaaataatatttgattcatatatatattgtaatgcacaattcacatttcacaattcataattacagctaaaattcttgcaatatttttagaattgtcatgaagaattatttttgcaatatatatttaattaatcttagaatacatactaaaattcctattcttatttaatttggaataaaattcacataaaatttattatatatcatatgtgaagcatttccaaactcataaatatactttcatactaattttatttttattaaatttgattgtaaattatagaattaaagattctttcataaacacctcctattcttagatgatatatgccgcaataacagatttgcatttaagttcctagtaatccaaacgttaaattaaagcaaaatgtagaaactcaattacaacatatttattttttatatactgattagctacaagtaaaatatacaattcaaaaataaagatagtttacaattaaatcgaaagaatttctaaagaaatttggaaatcctattaaaaataacttttcaactaaaaatcccaagcaattaattatatagcacatatatttattcg

SEQ ID NO: 213 - DNA, 2359 bp, Clostridium beijerinckii
gtcttgtttcaaaatggacaactgttaatataccttttgttctctctaaatatacacaagctgatggaaaagaagtagttacaactattcaaagtgtactagacagcttaatgccaggattagttccgcttttactaacatttttatgtatgtatctattaaagaagaacgtgaatccattaataataatctttggattatttgcagtaggtattttgggcgtagcttgtggaatattacagtagatatataaatatcaaataaataaacggttaaattagataatatagtaaacttccttaaaaatagaacccgcaatatattagcatggtatgtagaaatatcaacaatatattgtgggttttgtgtataagtatgtagtaaatccgacttttgtggataaaatttatgcattaggtctaagtatatagctacaatagtaaatttgcatttgatatctgaataatgtaagttcacaatcaagattaaatctagaaaaccaatattagtatatatggtgctataaaaatatgaaatatataatctcttatatattttaaaaagagagggttatttatgaaactagagtataattatattgcttttctaattatcaatttttagttagtgtaagaagggcgtatagggttatgaggtggcacttatgtaaccagtaataatcttatatatagaatttagggaaatataattgataagagtaactaagattacagcaaaaaggaaaattaaaataagtgttgaatgattatataggaatgttgaatagtgaagttgaaaataataaataatggattaagaatcgagaagacagattttcataattgtagaggggaattatatggaatcaaacatgaaagtaaagatacaaggaaatagatcgaataaaacagaatatttaataagagatatggatgatattatcattggtagattcagtactgatgaattaactgacagaagcaaaacatgcaacgtcaatcttaagttctatagagaatataattatgaattattaagtgatacactatcgcttatattaaagggaatatttaaagatccgaatatttttaaggttaacataaaagttcttgaaaaaatagacttaactgcatttttagatctaggttttactctagaaggaatatttaatgaaaatgaatattttcaaggtgaatatcttgatgaactgtcatttggtataactagaattgaatatgaccaaatgtgcaggtattcattagtggaattaaaaggggaaaatataattcttagaaatctgactcctagcaatgctcaagaaatgttggattattataaaagaaataaaaattacttggctcctttcgaaccaagtagagatagtgatttctacacagttgagacacaaagaaaattgttaaataagagttataaggaatttttgaatggaacaagtgtagatttgggtatttttaaagaagaaaaattgattggaaagataaaactttcacgaattatatatggatcgttgaagaatggcatattaggttattcaatagatgaaaatgagcaggggaatggctatatgcaagagagtgtaaaactgctactaaattatgcgtttaaagaatgtggtcttcatagaatagaagcatcagctttgataaataacaaaaaatccaaaaatgtattaactaaatgtggattcagattaattggagtaaatgaaaaatatctattaattaatggaaagtgggaggatcatgagacctattatatattagaagaatacttaaataactattaactatacctagcgtatcaatagtagaaatgagaagaaaaatggagtttggtataggttttaagatttaaatggtataaatgatgatttttgtcagaatggctaatagactatgtgttaagataaaacacgtcgctaagagacataaacaaaacaacttaaaaggaaaaagattttctaggaaagttgttgacaatgtcgaatggtgatgatatgataaaatcctcgctaagagatgcaaaattaataacttaaagctaatagaactactgaaaaatgagttcaaaaagtttttaaaaaaagttgttgacaagcttcgaaagcggtgatatactgagtaagctgtcagaaacgacagataacaacaaaacattacaacagtagttgtaagaaagaaaaattggtctttgaaaattgaacagaatgatataaatacatttaagtaaaccagcaatttttatttgagtaagctaagattaaactttttattgagagtttgatcctggctcaggacgaacgctggcggcgtgcttaacacatgcaagtcgagcgatg

SEQ ID NO: 214 - DNA, 2209 bp, Clostridium beijerinckii
attaataagtcttgagcttttgctacatactcatccttaccgcatacccctactttagtacagcccttacatccagctgtttcttgacattgataacaaaacattgacatattatgtcctcctattttaccttttatttttgtataaaattaaataattcctttttattatttcttaacttcggcaatttaaagtttactatattcttttcatcatttctgtaacacacgttactattctaaaattaataaatttctttttatttctatacgtgaaaaaataaaaaagatacttgatttctagtattctgaatcaaatatctttttcatcaaagttaaagcttagtttcgcaataacacataaatttcaatcgttctatttcaaaatttgatttagctaatatttctggccaaaccttaacgattatatatatcttatttttttgtcattagcgtaaaaattgttcttcatctacatgcaattttaattgtttcttagatggaagatatgattgctcccacttttttcgcattagtcagcatactcatttcgagtattgcttccatagatcttgattcatatttatatctcttgattttaagtttggattctataatctcgtttaatgtcacttccggatttctcccccttgcttctataactgagccattagcttctcctatcatctttagcgtaactactaattaagattctaggaagttattattttaacttctgttttaaatttgtcatctgacctatacattcttctacaattaaacattatgagaataacttattatactatataatccatacttttcatctaggaataattatctacatctagagaaaaataaatatagcaacatttgtttatgttgctacactataaatcacctaaatattttctttattgaccatattattaatttttattttctctaattattgattaagaactataaattttttagcatattttattatccctattatgtaaccaactactgctactgaaataaataaacatccccataatagaaatagaaccatattatataaataatttattatatcaaccataaagatcctcctaaattctttctatcttaataattgcctaatttatacaagcttaatcaactgaaatcatttatttaggattatttatcttacttacattcttataataaaaagctgtttgttttccatcccatttcacattcacggtttctccattattatataccctaacaaccttcccaacggtctttatgccttgatattcaatattaacctcatcgtcaatcttaaattctatatcattcgtttcaagatctattttattctttttatcatccacctcattaatttcaagattaaattccgtattaattagttcatttgaatgataacttggcttttgattatattctaatatccatccttttggatttatcactatagttttttctccaggtattattaaattagcatcaccttttcttttgatatattgtttaggcttaagagcctctaacttttgtttttgtgtttcatttattttcttatcactattcgcaataagtatttcttctccaggcatgattcccacatctttaggtagactaaactcatttatgccacttgcattaaaatacaaagttttatcgtctaattcaactaacactgcgccactcagtgtcttaactattctgctacaactttgtgaatataatctagtgattgcataaaacttatccacttctttagtttcttctttaataataattttcttgggttttataacttctatagcaggtaaatcaaatatactaatttgtccttcgatgaaacattcacttttcatattcatcctttcaatatctttaatctgttttagttcttttgttcataaaaaacaaataaattttatctatttatgtaatgttaagcatttatccatatatcatttatgaaaacaaaatgaaggaggttaaaactatggctgtaactaaaactatcgactcagtttctcttagtatcgaggttcaaaaagctttagataaagctggggacccaatttataccaagagtgcgacttgttgctatttgaaaagaatagcctaattaaatgattaaattcataaattagaactgttattatgagaaaccaaatgacggagtaacgtcccgaagggtttac

SEQ ID NO: 215 - DNA, 1974 bp, Clostridium beijerinckii
taaaatggatcctatagaatggacagttagaaaaaaggcttataaagctaaatttcttactgactctattttacagggtctttttttgttacaattaatttcagtataattggagggatgtttatgggcgtcaatcattttacagaagaacaacaagaagaattgcgaaataatccatatatcgaaaaagttagtaataaatcaatagcttatacaactgaatttaaagaactgtttgcaaaagaataccgtgccggaaaaataccatctcaaatattgactgaatgtggaattaatcataagttcttaggtaaaaaacgtaaggatgctcttgttgcaatggtgaagagatgtgaatttcgctcagatggctttgaagatataagaaaatgtaacttaggtcgtccagttgcaaaggatttaactgatgctgaacgaattgccagactcgaacatcaaattaaatatttaaaacaagaaaatgaatttttaaaaaaaatcgaatttctagacaaacaagccgaatggaagaacaaacagaatcaacgccagaagaaaaattcaaactcatccaagaaatgactcagcgtgataataatgaattaaatataagttggctatgtaaaatggctcgcgtgtcgcgaagcggatactataactggcttcattcatttgggcaacgatgtaataaggaagaacaggatagagctgattttacactaatattagaagcctataagtatcgtggatatgataagggtagacgtggaatatatatgcggctgctacatatgggcgtgcgaatgaatcagaaaaagattagccgtctaatgaagaaatacaatctcttttgtccaattaggaaggccaatccgtaccgtagaatggcgaaagctcttaagacagatgccatatctgataaccttgtaaaacgtgaatttgtagaacatggtgcagggaaaatacttcttacagatatcacatatttattttataaccatggctgtaaagcttatctttctgtcattaaagatgcgtatacaaaacaggttctgtcatatgtagtaagcgagtctcttgaagttgattttgtgttagaaactattaataacttaattgataaacatggagacagccttcaaatggatgctattcttcattcagatcaaggctgtcattataccagcatttctttccgtcagttgctgaaagacaaagagctgaggcagtctatgtcacgaaggggaaattgctgggataacgcaccgcaggaatctttctttgggcatatgaaagatgaaatacatctagacagatgcagtacttacgatgaactttgcaatgaaattgataattatatggactattataataatgaacgttatcagtggaaactagcgaagctggcaccaaatcaatatgcagaatatataataactggaaagcatccgctcaacgatgaacagacaggtcttccatgaactgggtatggtaacgttggctatacatagcccggtattcatccttaatcagtgattcagaactacactctggattgatcatgtcatagaaatacatttcatatgcgaggtcatggaaatcggtttttaaaatccatttcagcacataaaacagatagtcaagttcttctgtaattatcacagcttccatcatttgtacataaaaccatatccacttcacttcattaagctgttcgcaataacgaataacataagagggaatatcatcacttaacatagattccttgaaagtatttaagttttctataaattttctatttatcataataatacaagatacagttagctattaagatgaaccaacatcaaatccaaaggattcaatgttggctcatcttttctgcatctcctccttacggataaaatacatgatttagatttaaaatctaatgcctttttttataaatgtccttgacaatgggaccactttaga

SEQ ID NO: 216 - DNA, 1930 bp, Clostridium beijerinckii
aatcgagtaggaggaaaacaattattttgttttccgacctctcacaccaccgtacgtaccgttcggtatacggcggttcatcagaatttaatgcatcatttgatatgtttgtgttagactaataaatcctatagattctagatatttattatttaaagatttgctcaaaatcgggctgttggaaattctccaatagccttttcttgtattagcgtattcccatgctttgtatttattaattcctaatttagctagatttctttgcttggtgctaatcttcttccattgtttccatatgcaagctcttagtcttcttctaatccatttatctagttccactagccttccgcgtgcgttagcaattccatagtaattaatccatcctcttgtaatttgatttaatttaagtaacctatattccatgctaattcctttatttctgttagtatagaatttaaccttttccttgaatctctttatggatttctcatggatccttatttctgctccgcttttcgagaagtaaaacgaaaatcctaaaaattttcgtttagatacaaagtctactgcacttttatccttatttactctaagttttaaattattttcaattatattggtcatagatttcattactctaagccctgctcttttgcttttgacatatacattattatcatctgcatatctgcaaaatttgtgccctcgcctttcaagttctttatccaattcatctaacattatatttgctaataatggacttaacggaccaccttgtggtgttccttcttcacttgttactgaaaccccattaatgaggattccgcttttgaggtattttcttattaatgataacaatcttttgtcttgtatcttcttttcaagtttactcataagaatatcatgattgactttatcaaagaatttctctaaatccatatctataacccatctatttccttgatttatatattgttttgatttccttatagcatcttgtgctcctctgcgaggacggaatccaaagctattctcggaaaataaaggttcatatattctagataaaacttgggcaatagcctgttgaatcaatctatcttgtacagttggtatgcctaataatctaattccaccatctggtttggatatttcttttctccttacaggtgatggattatatctattttctagtagtttagctttaattgtttcccagtgtttcttgatatgctcacgaagttcatcggtcttcattccatcgacaccatggctacctttattactaattactcttttaagtgctagaagcatattatttctttctagaacttcttcaagtaatctactagtatcaaatgttccatcgtttacgctttctctatttggtaaaaccatagaattactccgcacctttgatttaccttgaagttccacttctacttccatcacttggtctctatattgagttttctgctttctttgtaattgctttgatttatccaaagttgtaaacctcctaatgttcagtccttcatccgctatcgcgtttagcggagttactatgacttctgctgacttctgatagttcagctatatatcactatataggttgtatcctagaaatttaattcatttggcacttatctatcagacctccccaggtaagagcacgcactttcacctcatctatctgccacatttactcattctgtttcggatagttattgggctttactttgtatggcaagtttacccacagaattgagcctcagatgtgattcgtattcctcagaccaaggctttgccgccgacttccttcagattccaccttgcgatggacacccttgtcttaagctaatggttagcactatcagcccccattacggactttcaccgattagcgcgtgcccatgctgggcacaccataaaa

SEQ ID NO: 217 - DNA, 1879 bp, Clostridium beijerinckii
agcaactatttctctccaatttatattttcattattattcatatagataaacctccattgttaaaatctatgctaattttaacaatggaggattgcattttctatccgttaatttttttacgcttacaataatatatctaagctaatgcttttaagtttgaataagatttatatgcttgtaaaatacctccgataaataaaccaactgaaaagccagataataatgaatacaaaatattaaagaaaagtgtactgtatagcaatggattaacagccatagcaacatttagcagatatttagcaaaaaaattagtcatcataatagttattgataaatatgagccagttttatatagagagccatcctttatatatatttttctatatcgagaatataaataatatgatattaaagtaccgaaacacatacaaatactatagaaaatcatagaaatgcctatatagctaaagtttgttagtagcttttctaagccccaaataataaaaatagatggcataatgaacattttaggaagtgataactcaccatctctactagctttaattccacgctttaaaagataaataaatataacccaaacataaaaaggagtttggctaaatacctctgaaataatattaataatcatcataataatataaccttctttcttaattcatatcatgttgtaagagtacaatacaaattaaataagaacaatacgtatttacgtaagcggtatatttatataactaagcggtattaaaactaatataaaaataagcagaagcctactgttgtttgttgttttttctatttctatctaaaatctcattcattttttttacgtctattttctcatattgataattaatgagtcgtacacatatgtaaattaatataacttcaataaatgttgagagcattaataataaggacatattccagttaaaaagataatttgacgcagcaatcattaaacaaattacaattatatataataatgggttaaatattgagtccttagaaataatatatttattgataactatctttattaatgaaaatgataatgataaagctaataattcacaaatcttttcattatctaaagattgttttgtaataagctgaaatattgttattactgtaaaaactactgaggttaattttaatattttgtttaaatatttaaaggtcatttgctatccctcattcccaatttgttttttaaatttgcaacatatcttcttgaaattattactttttcattattagttaaaagggtctctagatttccgcttaactttggataaaaagagtgtatcttatcaatattgagtagcaaggatttggaaattctaataaaattcatactagataattgttcctcaagaacatacaatttctcggaaatttcatatgtttgagttttggtatagatgaatacttttctatctattgattctatataaaaaatttcatccacgtttactttgtaatatttttcttcttttcttccaagtaagtgtttaataacctcatttgatgatgtcagtaattctatggcttcagtaattttttcttgaacattgtgtacgttaaaaataacttcttcctctaattcagaagagataatgtttatactaaccttcatttttacactcctacaaattaaatactgttaatatataaaatcatatagcacagtttcataaataatcattatttttatttaaacattcttctaaacaaaatatgataatcattttccataaagtacatacttatttatatataaaatatcatatagactaaaataagtaaattgcagaaattacttccttaagaatggaaatttaatattttatatagtaa

SEQ ID NO: 218 - DNA, 1870 bp, Clostridium beijerinckii
caaccagtcattagttagtcttgggcttattatggcgatgtaataagttaagtgtagacaaacaaggtaccaggccgcaagcgaatgctgaaactactagccacgaaattatcacaaagtcagaaaggacgataatatcggtaaattagaagtcagaacatagataatcattattgcaagaatatctgtgctttctcgtggttttaaggtgtagcatggtatacattgatatagtacgtcaacttgggaggactcattattctctgacttcagagtatggaaaacaatgattagaaatcagaggtattcaaatgataatgagtagtcggattacaccatagtactgaagaaatgagtaatgaccatggagggaagggtgtaacatattatagaccttgaaaagagaaacagaaattctcacacagaggaggaaaaaaaatgtacacaaaacttgagaggatagcagaaatagctggaaataatcctaaagagaaatttacatcactaatgcatttagttaacaaggaaatgctaattttatgccattatgaactgagcggaaataaggctacaggagtggataaggtaacaaaggaagaatatgaaactaacttagagaataatattgataatctactaattagaatgaagacttttaaatatagaccgcagcctgtaaggagagtatacatagataagtctggttcaaacaagaaaagacctctaggtataccggcatatgaagacaaagttgtacaattagccattaataaaatattaaaatcaatatatgaacaagatttcattgatagttcttttgggtttagacaaaatagaagttgtcatgatgctcttaaaatcttaaatgtatatttatctgaaaagaatgtgaattatgttgtagatgctgatattaaaggattctttgataatgttgaccacaagtggttgatgaaatttcttgaacacaggattgcagacaagaacttacttagatatataggtagatttttgaaaactggaataatggaaaacggaaagttttataaagtatatgaaggaactccacaagggggaataatatctccaacattagcaaacatttatttacattatgttttagatatatggtttaataactttatcaaaaagaagtgtaaaggacaggcgtacatagtacgctatgcggatgattttgtttgctgttttcagtatgaagacgaagcgaaagctttctatgaagcattgaaaaacagattagacaaatttaacttgcaggtagctgaagataaaactaaaatattatatttcggtaagaatgcctactatgatagaaaattcaagagagcatgaaagttagaatcatataaagatagaacttttgattttctaggatttacacacttctgcagttgcagaaagaatggaagttttagagttaagaggaagactagctcaaagaaatttggagctagcataaagagattgaatgaatggttaaagaataatagaacagtgccgctcacattattaatggagaaactgacacagagactaataggatattataggtattacggaatcactgacaacagtttaagtctcgcaactttcagatatttagtaagaaaactaacttttaaatggctaaacaaaagaagtcagaaaagaagttataactggagaagttttgacactatgtttgagtgcttcaaaatacctaaagctaaaatatatgttaatattttcaacttaaaagaagatatatcatatatactgtgaattataatgtggggagccgtatgcgggaaatccgcacgtacggttctgagaggggttagggaagtgattccctagtctacttaccaaa

SEQ ID NO: 219 - DNA, 1765 bp, Clostridium beijerinckii
tagataattgcgaaactcattgataaaaatgaataatgattgatttgaagttgcaaaaacattattaatggatttaatggttcctgctatacaaatataatagttgacttcttaaaaaagggcgcacgaaataaagcgaaggtgaattccaatttttataaataaattttatgcaattaatggctttaagcttcggatatatttatgtttatgaattttatctgccacgataactgttattagttgagttattccggctagaagtaaatcagcatgaagtgtttgctcattttgagtcttacgctccgcgacgcagtaactatatttgaagtgatttatatttttttcaacagctactctgattttataagtattactccattcttgggttcctcgtgttattccaggatatgcgcgcagattcttttcaggataaatataaaacattcgtccacataaggaatttgtacatggattttcacattgagttacacgtttgctctttttggtttctttgttatataaccatttcattttagggcatacaaacttcattgttggaattctagaacgaagatgacttttactaccttcacgtttcattggaatagaaggatcattcggacagcatggaatgccgtcttcgtttaaagggcaatcagcattttctagtgtaagcctagtttttaaaggaatatatgctttatcaaattttaattcgagaagaagatcacgataaatttgaatactgtcaaaagcagcatctcctaaaaaggtttttggacttattaatggatgcttgttaaaaaaatctttgagaacagggataagagccttagaatctgcaagagatttatcttcatcaggtgaatcagattttttctcaacaataatatcaggatgagcattgagaaaatctttattatagaacgaaatatctcttacgataccgaggccattagtaatgattccgaatttaaaagcatagcaaaaatgcccattaatatacatttgttggatggcagggttggctgaagcgtgtgatggcatagagccataggcagctttataaggatcataagagtcatctaaattgcatgctttcttaaaatttttaagctgttttataatgcgattagcatatttaggattattttcagtgacaaatgcttcaaggcctgaagtatcaaaaatagtcatggaagcaagagccgtatcaatctgttggcatatcggttcagtaatatcaacaagattatcgaacatggattgtaagtccaaaagaaagtcctgcttgaaacgagtaaacttagatgaatcaggaactcttaaaaagccgcagaagtctcttagttcttgagaatatttaaggaaaataattaaaagagaatctgtaggaatagaaaaaatgcgttgtaaaattaaagcactgatcatagcataaagctgatattttcgcggccttcctgtggaagcgtaaaaatggttaatgaaagatgcaggaactaactcatcaaggtcgatagtgttttcgagtaaagaaagaaattggaatttatcattttcaaatttttctttgcaatcagaataaacatctgccaaagaaagctgtttatatgttatcatatatatgactcctttctgaggtatatggtagttttgtttttaggcaattcaattttaccataaatcagtgaggagttattttattttgctaaaaaaatatcccgcatttctgcgggttgcggcgtttcgcaaacgccta

SEQ ID NO: 220 - DNA, 1759 bp, Clostridium beijerinckii
tatattttagtcaaacaggaaatacagaaaaaatggcaaacttaattctagaaggaatagaatcagaggggaagaaagccgaattagttgaagtatcaaatgcaacacttgatgatgttaataatgaagaaatacttattttaggatgctcagcttatggatcagaagaattagatgaaagtgaaatggaaccttttgttaaatcattagaaggaagtttgcaaggaaagaaagttgctctttttggttcatggggatggggcaatggtgaatggatgacagaatgggaaaagagaatggagtcatatggtgctatattaataaacgaaggtttaaccgtgcaggaatctcctgaaggtgaagatgaagacaaatgcagagattttggaaaattaatagcaaaataggaataacaaaaaccatgcaataaggagatttatctcccttattgcatggttttcaattttatacagtggctttatgcattttgcaatagttcaaatacttgtccaactttaaaagtttagcctaatatttgttttaaatcctcatcaggagtactgattggtttaagatcgaaattatcaactaagaaatttaatacattaggagttaagaaagcaggtaagcttggcccgatatacattccttttacgcctaatgaaagtaatgctagtaaatcacatacagctttttgttcataccaagacaatactattgataaaggtaaatcattaactgtacagttaaatgcatcagctaaagctaaagctattctaactgctgagtatgcatcattacattgtccaacatcaagcaatcttggaagtcctgcaacttcaccaaattgtaatttgttgaaacgatattttccacacgctaaagtaagaataatacagtcacttggaattttttcagcaaactctgtataataatttcttccaggctttgcaccatcacatccaccaattaagaagaagtgcttaacttttccgtctttaactgcattaataattgtttcagcatgacctaaggttgccttatgcccaaagcctactaaaatttctttaacttcttcgtcttctgtgaaaccaccaagttcaagtgctttatttattatttcagagaaatccttatatccattttcatctttttcaatatgtttaataccatcaaatccaacaacacttgttgagaatattctatctatataagaatcttttggtctcattaagcagtttgttgtcattaaaatacaaccaggtatattatcaaattctttttgttgattttgccatgcacttccgaaattacccactaaatgaggatatttgtttaattcaggatatccatgtgaaggtaacatttcgccatgagtataaatatttattcctttaccctcagtttgctcaagtaacatttctagatctcttaaatcatgtccagaaactactatgaatggaccttttttaatatttacattaacttttgtaggtgatggagaactataagtagtattattagcagtatctaaaacttccataatcttaacactcatagtacctgtttccattgcaagtttaatcaaatcttcaagatttaaactatcatcagctaaagctgctaaagccttaaaatagaagtcatttacttcatcgctagtatattttataaatctagcttgatgagaataagcagcgattccttttaaaccatattttatagtttctctaagagaacgaatatctggatctaagtt

SEQ ID NO: 221 - DNA, 1751 bp, Clostridium beijerinckii
tgccaaataaagttcgtgctagagttgcagtagaagcattaacaagctttggatggcacaaatatgtgggtcttgatggagatgttatatctttagatacttttggagcatcaggtaaagcagaaatcctattcgagaaatttggattcactgtagaaaatgttgttgaaaaggctattaatgtagcaaagaaatagaagttacagtaattaaatctacgatatagtagagaaaatttagcgattatagtaaaactttagaaaaatagatttaaccttaaaatattaataaatatagcgaaacagatataaaaagatttggattaaaagtgtgtaaattaattaatctataaatatattaaaatcaatttattcattattataaaagttaaaattattaaaagatatgtataaagatgtgtgaaaagattagtgtgaaattatgtaactacaataataaatcattggttagaaatatatttatagatttttaataaatgtatatttaagaaagggagattaatatgattattaaaaatgttaatgataaagagtttaaaaagtatggacaagtactaaaaaactatgattgtacagaaataattgaaaaaatgaaaagtacaccactaccagaagatgtaatatatgaaccatcaattaaggaacttgaagaattagctatagctaaagagttacaagatagagaatatggagaattaccaatacaaataggatactgtaatggtaacaactatatgttaaatgcagtagaatatcatcgttcatctgagattaatatcgcagcaactgatcttatattacttataggaagtcaacaagatattgaagacgattactcatatgatacatctaaaattgaagctttcaaagttccagctggaactgcaattgaagtatatgcaactactcttcattatgcaccttgtaatgtaaatgaagaaggttttagatgcgttgtagttctaccaagggacacaaatttacctttagaaaacaaggctgaaaaaagtggagaagatgcattattatttgctagaaataaatggctaattggtcacaaggatacagatttaggtgaacaaggagcatttatagggttagttggagaaaatatctcaataaaatagattataaatagaaattaaaatccataattttgttttgaatctaagcagacatatggactctatgatttaaatatgtttgcttattatataaatcagcaaagaaatatagctgatatttacttgataataataaatttaaataaactataagaagacttaataagcataaaaattattaaataaactataagaataagctataagaataaactataagaaataagaaagacattataaattaaatgaaatgaaaagatcagagtaaaatggaggaattagacaatgaataatataccacaagtaaaattaggaattgttgcagtaagcagagattgtttcccaatggaattatcagcaaatagaagaaaagcagtagtagaagcttttaatggagaaatttttgaatgtcaaacaactgttgaaaatgaaaaggatatgagaaaagctttagctgaagttaaagaagctggagtaaacgcattagttgtatatttaggaaactttggtcctgaaacttcagaaactttacttgctaaagaatttgatggaccagttatgtttgcagctgcttcagaagaaagcggagataatttaataggcggac

SEQ ID NO: 222 - DNA, 1712 bp, Clostridium beijerinckii
gttagagtataattttagtaggcaaagataataaagaatactatataaataataaaggagatgcaaaagcatctcctcaatacataaattatccattataattaagttgacgaaactaaatagaatagagttagatttatgtatgaattaagtttaaatgataatggatttactttcaaggagttagagaaaagaatttataaatatgcttgtgatgaagcttgcaatgcattaaaaagcatattagaatccttggatgaaaaactacttaatgaaagagatagcaaggtttaccgtaataaaggccgtaagcaaacttgtttgaggactattatggggaatgtagagtattctaggcgtgtttatgaattaaaacttgaggatggtaagaaagcaactaaataccttttggatgagtatttaggaatggatactataggaaatgtttctataaatctcgtagaaactattttgactaacgtggcggatgtttcttttagaaagacatctgagaatattaaaactatgtgtaatcaagaaattagtgctcaaggcgtttggaacgtagttcaaacagttggagaaaagattaaagaactagaaaatcgtaaaattgaactagatgataaaggtgtgttaaaaggcgaaaaggaagtaccagtattgtttcaagagcaagatggagtttggctctatcttcaaggtaaagatagaccaaaagggaaaaataaaaagaaagagttaaaactagcagtatcatatacaggctggactttacgtccaggaagcaaaaaagaatatgtagttgttgataaaactgcttgtgcaagttttagtaattctagccactttaaaaagcttgctagcgcaacaatttcagaaaaatacaatgtagacgaaattcaaactagaatattaaacggtgatggagcaaagtggattaaggcaacttgtgaggatcaagacattcattttcaactagatccatttcatgtaggtcaagcaattatgcgtaaggtaagtgataaaagaacccaaaagcaattattaaaactatttagagaaggtaaaattgatgaaggtctagaagctattgtaaatatgatgacacttacaaatgaagaagatgtttcatttaagaagcttactgagttatatgattacttagctcacaatagagatggattaacaccatataaattaagaggtaacatagacatgcctacggcgccggaaggcatagaatacaggaatttaggtacaatggaacataatatttgtgatgtattagctcaaaggatgaagggcagaaaaatgagctggtctattaatggtgcagataatttatctaaaatattatctgaaaaatttagtaataggttgtttgatactgtggataaaatctatagaaatattattcctgataatgttattgatacaatagttacaaaactaccattaacagtatttcaagcaaataaagaatctaataaatgtaaggtatataagtgtaatagcgcacaaattccgtacagcggagctgccacaacgctaggtagaaaaatagtgcgtgatttatgtggattaaaatcatttagtgatattagttatagttaagtataaagcgtgtgtagggaaattctaaaaatatgatgtaaaataatggataataaattaaataaaattcttgccaacttttacttgactcaaac

SEQ ID NO: 223 - DNA, 1685 bp, Clostridium beijerinckii
aggaacatttgcttatgtattttgggatctctttgctcaaacggagtttgatttcggagaacagcaaaaatgtagtttataattttatgcattatagcgactaaggcgattttaggctttttgcctttaaggtttatttgataataatctaataggactttatttataggaactccattacgattgttacggattgaagctagtgcaacagaatataatgctcttcgaccgattcgagttcctctttttgaaattttattatcatcgcctttaaaattacctgattgattaactgagctatcaataccaaagaaagctacaagatgtttgggcttaagaaaaccatcaatatcacctatttcagctattatagtaatagcagttaattgccctatgccaggaattgaatcaattagttcaatattagctctaatagattcaggaaaagtttcagactgtataaaattgttaattttctgtagcaatgtatcaatctctgattgaatagtttttattaatgttatagagctggctattttgacggctaaaccgtctaacggtaagccaattattttagcttcattagcaaccttaaataatttggaatatgtattttccgaccagataatgccctttttagagctattaaggaaaatcttaattatattttccttaggtgcctctaaaattgattgtggcgttggatattgacttaaaagctcaattgaacttttagatgttgaatctgaaaatatagtattatagccaggaaaaataactcttaaatcagcggataattttttcttaaaagtagagctagtatctgtaagtttgtaatactctcttacaagatttttcagaagaaaaatatcaaggctaagttgttgtgataacttaatgttttgaaattttcctattgttgcaatagataaagcgtcttttttatcatttttcacttttcttatgtcaccatttttgttagacttagtaacgagtggattgataacaaatgtgttatcgaaatatttattaagatagtggaaaagagataaatggtacacgccagtggactccatgaaaattgcagttttcatgttaaactcttcttccactttttttatttcattaactaagtggttgaagccattgagatcatgctttattttaaatgacttcttataaatatcaccattcggtgcgagtattgcagtatatgaaaaatcagctgaaacatcaattcctattacaggactataaaaaaaattagacattgtatatatctccttaaattaaattttagatatagaatagaacttccactctgtcagatagcttataaccttgtttgtgacacgggtaattcccgaagggaaacccaaccagctaaacatagaattctacctgatgaaatgatacgcttttttacgggtataggttctaaaagacctcccaggaggtttacatctatcttctattcaggagtattatactagactatataaaacttggttagattcctttaaggaatttaaataaaaaactatttaagatatgaaatgcatattccctatcggggcgtaggcaaagtaataaattagaatattaaaaataataagaggtgtaatgttcgttagaaagataaatagttttctatcaaatgttacaactagattatacaaggaggt

SEQ ID NO: 224 - DNA, 1682 bp, Clostridium beijerinckii
atatattaattgatattcactttaattttaaagaatacttcatatttaacattctaaacctacattttatagaatttctatatgaaaacaaaaaatatggtaaattcatttctgaatattaccatatttaagtaatcctctaaattaattttttttatatacggcatataattttataaatacttttcttattattaataaaacgtaataaagaatcactatatcaaggaataaatttactatattaatgttcattccaatatttccattaaataggttactgaataaataagaacttccttcgtctccttgatatacagaccaataatttaaaggaaagccaaacgcgtactcaaaaaagcttcccatattctgttctattttccctggcaaaacaaaggtgcttgttaaaactataaatatacttaatttacattccaaaatctctattcttctcttaccattcatattttctaattctaaagtttcttttaagaacatatatccaaaaacaactgccggtattaaaaatattaaagatataattgctgtataatgtagtcctgtatcgatatttgaccatggacctaaacctacagactttaatataagatccccgtaactaggatttccgcccaatgaaattccaaataatattcctaaagcaaacaacattaatgaagttattcctagcaatacctttctgttaattttactcaaaattcacacctctatttaaacaatattttaactttaattgcttatatatacattatattctttaaatccatgtttcacaatatctcttttgccattgagctattacatgttatcttcaactaagaacctggctttctaacttttaaatttattatctcccatgatacataacaccaaatttttcatttactacaatttcatattgatttttaagaaatatatctgccaacatctatacgactctacggataatagttttacttatgtttataataattaagagataaatatattgaaataccaaatcagaatgcatatcttattatacaaaagcacttaataaatatttccaggggaatattaaaggtacaatgtttaatttaggcgcaacttgccacctaattcatgactttacagttcctcaacatgctaatgttcgcttctttgctttcattaatctaattctatcaaccaattgtgatttataatattccattttaaatccaatacaatataaggactgaactaatgaagttcagtccttatattttcaatgctacgtatgagtttgtaatactatccactatatagataaacaattcaagaattagacttattagatgaacatatttacaaattttctaaaacttcaagttcatatcttcactagaaatcataaatatatttgtgaagaaaacatttgaaaatgagctgctaaaggttcttagctgtaggttgttccaatttagcttgtcaaactgaaagttggagcatgctaaattggatacaatctgccgcttagaaacttcagcgatattttcatagcttttcggaacaaaatatttatgatttggtaagtagactagggaatcacttccctaacccctctcagaaccgtacgtgcggatttcccgcatacggctccccacattataattcacagtatatatgatatatcttct

SEQ ID NO: 225 - DNA, 1649 bp, Clostridium beijerinckii
cctgaattattcatagatatagttaataacataagaaagttagtttttcatgctattagctatttcttttcttaatttttaattatttttctaaatatacgtacagcttcgctacggactttaggttttaaccatatcttacatattaaattgtaatctgaatcaatttaataacggcagtgaattgatattttttaaaatatgccaaaactcattttgataagcacatgaactacagagtttgaattttaagtatctactactctttacaagtttaccagctactttaattattttcattcgtattgtttctattcttagagatttcattgaatttgtaaaacataatcttctaatccaattgtttaaattgtatgctaaaaccatctcttgaagcttattagcatttgcgataaaagatgaactactcattttatcgaaagcgaagccgtttttgccttctttaataaaattctccattgttcctctattacaataaaattttattacagcttctggatggctggtcatgttagtcacaacaaaagtataatctatacacatttgaccttctttcttttctaatttcacaacaactctacgttctttagtccatttctttgctttatatacaaattcaccatatatagtataatggtcatagatatttcttttgcataatatctccattcttgtagtaaattcttcagaatacttatacaatgttgcatttgcttttaatcttattgcatatttagcatcatgttcttctgcaatttcataaagtccaggtatagcaaaaccgctatcgccacgaatgtataggtctgtacaaatatatttatttgaatacctttttaataatggaccaataaaagccactgtttttcttgatgtataaacatttccagaacgcaactctgcctttaataaatcacctgttagtccatcaaaaactaatagtggatgatatccatttgctgaataatgtgaattgtatgctgaaccatattgattaccataagtttcaaaattagtagaatcaatatccaaaattatttgatttggcatatcaattgagtatactttatccaaaaccaactcatttattttattaaattgtcttaagttttctttatcgagattgttattaaaacgtgaaattgtaggctgtgaagctagtgcatttttatctaaaattgtagtaagcgctggatcatatcttaattcatctgaattatcgtcggttgtatagccagctattctttgataaactttttgtagtaatatctcttcgtttgtatgttctctatgattaattccatcattaacataaaaaacatcttttacagttcttgaaaaacctattctttcatcaaattcactatataaaataagaccagaatctgatgttaaatttccaccatcaaaattaatttttacatttctcttgaaattcaaagatttttctaataaactacccatatagactctcctttgttaattgttttttttcgcaaattaaccataacaaatttgagtctatttttctatattttttcacttaataagtgaagttttgaatttgttaagaacagcttaacgagccatgcaaagcatgtttcatataattttatgaataattcagg

SEQ ID NO: 226 - DNA, 1629 bp, Clostridium beijerinckii
atatattttcaaccagtcataaaatgtggcactatgaattcccatctcatcgcatatctgtataactgctttttctcctgataggtattctttaattcctttcaatttctcttccagagaacatttcatttttcttgacattaaaataccccctttatagaaacagttttattattttaactgtctactataaagggagcatatcatttatgtattgtcgttggttccatctttatttttcaaataatatatgtcttttattcaccatatttcttatggtacttaacttgaacttctatcttaggatgctttttgcaaaactggctaattacaaagcagcaacttggacaaggctcccatttgctatataaagttaagtttccctcatctttcaatacttttgcttctatctgtttatgtatttcttcaattatctttttttcactatcattgattctgtcatatccaattccaaactcacccaatttgttaactttattacttttaaaaaatgattcatctttcgttggtgcatgacaataatcctttatattattacttccgcttatcgccttaaattctttattatcatatactgccactgcaatatttatagaatcctgtaatgttttactttgatttattttaaatactgatctttcttcttcatcggctttcatatacttattaatattctttattaatcgctgcattctcggtatattattacttagatgttgatgatattcaacagtgcctttttgtggcgttatatagtgataatctatttgctttggaatttctatagatattgttttaactttagtattaacattataactttcttttactctttcttctttaataagaagcattttcttcaaaagctcaatatcctttgaatataaataatcattatctaattctttttccaaaatttctaatttctctttttctttttcacttactattctggatactctttttttaacttcttttatgtcaatcagcatatctttaacatcatctctagatactgcatctcgctcatattcaattctatttatatttaatatttttattgaatttatttttttccataatctatcatgttcatattcaaatagtattatttttttcatgtaattaattaaatcactaacatcatctgctctgtaagtggcctgcgccttaccaatacatttatataattcctctatgagactattctctactttaaaagccttggcaacttctattttaaatttctcttcatcaaagtaatttattttatagccttcttttttcaatgcatctttaaaatcatttaaattattaatctttattcgttctttttttcttttatttgaaattatgtttattttagtcatacttccctcttatgttttatgcttatctaaatatattactgattttaactctttaacaatttaatcattatatcataaattttaaaatgattataatcaaataccgatacggtttgagtcaagtaaaagttggcaagaattttatttaatttattatccattattttacatcatatttttagaatttccctacacacgctttatacttaactataactaatatcactaaatgatttta

SEQ ID NO: 227 - DNA, 1518 bp, Clostridium beijerinckii
gggtaatagtcccgtaagtgaaaactatgataatcagttctgcaccagagtaccacgagacacgtgaaaccttgtgggaagcagggaggaccacctcccaaggctaaatactacctgatgaccgatagtgaagcagtaccgtgagggaaaggtgaaaagaaccccgggaggggagtgaaatagaacctgaaaccatgtgcctacaaccgatcagagcaccttatgtgtgtgatgatgtgctttttgtagaacgagccaacgagttacggtatgtagcgaggttaagtacttaaggtacggagccgaagggaaaccgagtcttaatagggcgactagttgcatgctgtagacccgaaaccgggtgacctatccatggccaggttgaagcgagggtaaaacctcgtggaggaccgaaccacgttgctgttgaaaaagcatgggatgagctgtggatagcggagaaattccaatcgaactcggatatagctggttctcctcgaaatagctttagggctagcgtcggaaaatgtgagtagtggaggtagagcactgaataggctagggggcatagcgcttaccgaaccttatcaaactccgaatgccacatactatcagtccggcagtcagactatgaaagataagttccatggtcaaaagggaaacagcccagatcgtcagctaaggtcccaaagtgtaagttaagtggaaaaggatgtgggatttctaagacaactaggatgttggcttagaagcagccactcattaaaagagtgcgtaatagctcactagtcaagagatcctgcgccgaaaatgtccggggctcaaacttaccaccgaagctacgggttcacgttttacgtgagcggtagaggagcgtcgtaatcgggctgaagtcgtaccgtaaggagcggtggactgattacgagtgagaatgttggcattagtagcgagatgtaggcgagaatcctacaggccgaatatctaaggtttcctgagtaaagtttgtcttctcagggttagtcgggacctaaggcgaggccgaaaggcgtagtcgatggacaattggttgatattccaataccactataatcgttattatcgatggtgtgacggagaaggataggatgtgctagctattggatgctagtctaagcgtttagggagttgggattggcaaatccgttccaacaattctgaggcgtgatggggaaggttctacggaaccgaagtatctgattccatgcttccaagaaaagcatctagagagagaagtagtgcccgtaccgcaaaccgacacaggtagatgaggagagaatcctaaggccgacggaagaattgcagttaaggaactaggcaaattgaccccgtaacttcgggagaaggggtgcctgagaaatcaggccgcagagaataggcacaagcaactgtttaacaaaaacacaggtctctgctaaagcgaaagctgatgtataggggctgacgcctgcccggtgctggaaggttaaggggaacacttag

SEQ ID NO: 228 - DNA, 1477 bp, Clostridium beijerinckii
taggggctgctccaaattggcttaagtgtttggaatagtattatgtatgatattttatggaatactaagtgcatagatattttaaatatagggtaaaaacccttgcacttaggagtgaatttatatgtattcaattgataaccaattaaaaatagaagattttatatttccatacggagaattagataaaaataataggtgggttaaattagcgtcaataataccatggcatgaatttgaagaaacatatgctaaacaattcattaataatggtcgtccatcaaaaccatttcgaattgtattaggaagcttaataataaagcaaaaacttaattgttccgatcgtgaaacggtatctgctatcgccgaaaatccttaccttcaatattttattggtttgaaagaattccaaaattccgcaccatttggagcgtcttcaatggttgaatttcgaaaaagaattgatgatgatatgattattgaaatgaataatactattcttaaagatactactaaaaataatgatgataaagataagcatgacgataatgatgatggaaatgattcagatcaatctaatcaaggcactatcattattgatgcaacatgtactccagccgatataacttatccacaagatttaaatcttttaaattctgcaagagaaaaacttgaaggatatattgatcaattgcataatccttctgaatctaaaaagcctagaacttataggaaaattgcgcgtaaggattttctaaatgtttcaaaggccagaaagaaaaattctaaaaagatgcgcaaagctataaggaaacaattaaattatattgctagagatattggatatgtagtaaattttattgcgaatggaaaaaagcttaatagtcgacaatcagaagaatatgaagtgattttacagttatatcatcaacaaaaatatatgtttgataatagaaaacatacagtagaaaataggattgttagtatcagtcaaccacatgttagaccaattgttagaggaaaaactaaagctcctacggaattcggggcaaaagttgaaataagtgttgctaatggttatgttagaatggaaaagttgagttgggatgcttacaacgaatgcgaaagcttaatacctataacagagagttataaagcaagaaatggcttttatcctgaaagaatattggctgataaaatttatagaaatagaaaaaacttaaactattgcaaagaaaatggaattagcattaccggccctgctttaggcagacctaaaaagaataaaactaaagctgaaaaaaatcaagagtatgttgatacatgcgaaagaaatgaagttgagggaaagtttggtactggtaaaactagatatggtttagccagaatatttgcagatttaaaagaaactgctgagtgcgttattaatatggcattttttgtaatgaaccttgataaaaaattgagggtcattcta

SEQ ID NO: 229 - DNA, 1464 bp, Clostridium beijerinckii
aagaccccttgaagactacaaggttgataggtcagaggtgtaagtatggtaacatatttagctgactgatactaataggtcgagggcttgaccaatatagtcaagttgtaaatacattaaagaaactatgtgcaattttgaaagaacaaaatttctttcaaattaaagatctcgtgatgatggcatagaggtaacactccttcccattccgaacaggaaagttaaggtctatagcgccgatggtactgcatgggagactgtgtggcagagtaggacgttgcgaggtaagataaaaagatagttgtaataactatctttttttattttataatatttaggaatggtaagacgataagcttcgccgctgtatagctggattatttaatgccgtatttctaaaaaactcaataagtatgacgattttgtataactcatttctctaaatcattacgaaagagcttattaattcaatgtattcttaattctacaactgaatttctatcctaagcacatatttaagacggtatatttttacgataagtcttttttgatagagtccattccttatataacattaatatctattctgaacaacaaagtagttattgagagattaacaactttgcacactaatcttattataatatttcatattaactttatagtttaattttttatgattaaaaactcatttagtagagcatattttctgttattatatgaaaaagtttttatgtttgatgaaattttatgtatccaggggtaattggatcctttcatgatcataagatcttttattattttgaacttaatttcttattaataaagatatttagaattattaggaatgagataattaggctaaaaaacatatataaatgtaatagattgaaccaaattggagtgacaactattgctagcgtatcagtatgtataaaatctagaataatgacgtattataaagaaaaatgaaaataatcgcatttagtaataggaaagcaaataatatgaaaatatcagagatgttaagataaaacacgtcgctaagagacataaacaaaacaacttaaagggaaaaagattttctaggaaagttgttgacaatgtcgaatggtgatgatatgataaaatctctcgctaagagatgcaaaattaataacttaaagctaatagaattactgaaaaatgagttcgaaaagtttttttaaaaagttgttgacaagcttcgaaagcggtgatatactgagtaagctgtcagaaacgacagataacaacaaaacattacaacagtagttgtaagaaagaaaaattggtctttgaaaattgaacagaatgatataaatacatttaagtaaaccagcaatttttatttgagtaagctaagattaaactttttattgagagtttgatcctggctcaggacgaacgctggcggcgtgcttaacacatgcaagtcgagcgatg

SEQ ID NO: 230 - DNA, 1463 bp, Clostridium beijerinckii
taaaatggttcctatgtcaaggacattttgaaaaaggctaggcagctatgagctggtttctgtattgtacaggagccagctttttaagtccccactgatatctataattattataatactccatatagttatcaattgaagcttctaattcttcaaatgttgaacaactttttaagtcaatttcatctttcatatgaccaaaaaatgattcctgcggggcattatcccaacaatttccgcgcctagacatagactgaccaattttatattttttaagaagtttttgaaatctaggactagtataatgaactccttgatccgaatgaataaaggcatctttatttagtaaatttttgtgatttttcatcaactttttaatagtttcggtagctatatctaatgtaaggctattggaaagctgatatgaaagaatttcatttgttgaagcatctttaatagttgacaaataagccctattggatgctccatatgttaaataagttatatctgttaataaaacttttccgaccaaatcttgcttgaattctctatttaaaatattaggtacaacagtatgctcatgagtagctttcatcattctacgataagggttagcttttctaattgggcactcaatattatattttctcatgattcgttgtatacattttcgatttattataagattaaattcattctctaacaccatttttatagaacgagaacctttcttgtagcccctatgattaaatgctttaagaatgatatccttcaattctaaatccttttcttctctacgattacgtttgcctgttgattttaaataattataatagcctgatctagatactaaagctacttcgcataaatgtgaaaccatatttttatagttatatgtcaaaattatatgttgtattattacaaagattgatgatgcacttagtttactatttttcacctgcctttcttgcagctcgattttttttaatagttctgcctcagctttccaataagcaatttctgcatcctttttggctattatttcttcaacggttagttcacgtttaagtggacgaccactgtttaattttctagaatctcttagaccaagctctcctgattcattataagcattacgccatcttttacttgcacaccaaattctattatttccaataacatctatatcaaattcagcatcttgaaaaatatgaataggtagttttcccttgctacgctcagcgataaacaatattttaaattcatctgtatatgtaattccacgtttacttacagatttaacatatctattttttgataaacttttaatttcttcatctgaaaataattttttactcattcttttcacaaccttactatatttcttcttatcttttattgtacaaaaaaagaacctattgaaatagtctttttttagtgtctatttcataggttccatttta

SEQ ID NO: 231 - DNA, 1442 bp, Clostridium beijerinckii
ggattagcggcggacgggtgagtaacacgtgggtaacctgcctcatagaggggaatagcctttcgaaaggaagattaataccgcataagattgtagtgccgcatggcatagcaattaaaggagtaatccgctatgagatggacccgcgtcgcattagctagttggtgaggtaacggctcaccaaggcgacgatgcgtagccgacctgagagggtgatcggccacattgggactgagacacggcccagactcctacgggaggcagcagtggggaatattgcacaatgggggaaaccctgatgcagcaacgccgcgtgagtgatgacggtcttcggattgtaaagctctgtcttcagggacgataatgacggtacctgaggaggaagccacggctaactacgtgccagcagccgcggtaatacgtaggtggcaagcgttgtccggatttactgggcgtaaagggagcgtaggtggatatttaagtgggatgtgaaatactcgggcttaacctgggtgctgcattccaaactggatatctagagtgcaggagaggaaagtagaattcctagtgtagcggtgaaatgcgtagagattaggaagaataccagtggcgaaggcgactttctggactgtaactgacactgaggctcgaaagcgtggggagcaaacaggattagataccctggtagtccacgccgtaaacgatgaatactaggtgtaggggttgtcatgacctctgtgccgccgctaacgcattaagtattccgcctggggagtacggtcgcaagattaaaactcaaaggaattgacgggggcccgcacaagcagcggagcatgtggtttaattcgaagcaacgcgaagaaccttacctagacttgacatctcctgaattacccttaatcggggaagcccttcggggcaggaagacaggtggtgcatggttgtcgtcagctcgtgtcgtgagatgttgggttaagtcccgcaacgagcgcaacccttattgttagttgctaccatttagttgagcactctagcgagactgcccgggttaaccgggaggaaggtggggatgacgtcaaatcatcatgccccttatgtctagggctacacacgtgctacaatggctggtacagagagatgctaaaccgtgaggtggagccaaactttaaaaccagtctcagttcggattgtaggctgaaactcgcctacatgaagctggagttgctagtaatcgcgaatcagaatgtcgcggtgaatacgttcccgggccttgtacacaccgcccgtcacaccatgagagttggcaatacccaaagttcgtgagctaacgcgtaagcggggcagcgacctaaggtagggtcagcgattggggtgaagtcgtaacaaggtagccgtaggagaacctgcggctggatcacctcctttctatggagaaatctaga

SEQ ID NO: 232 - DNA, 1342 bp, Clostridium beijerinckii
taagaaaattgcttaaaaaaagtcttaaggtcgaagtctatatatctattaacttatttttgaaaaatatcaaaaataagttaataatttaaagtaaaaatttggttaatcaacacttgtgataaattcctaaagaataaaaaaaatcctagcagcaatcatgctactaggattatatactttaaatatattgtagattattaaatagggtgtttccttatttgatcgaacttattttatttgccattgtaatttgccataaattatttttatgcttccataaacatcttcatgtcatcatctacattagtgattccaccaattccaaagttatcaactaatactttagcaacatttggcgaaaggaatgctggaagtgttggtcctaagtgaatgttcttaacacctaagtgtaataatgataataatactattacagctttttgttcataccaagctatgttatatgatataggtaattcatttacactctttaatccaaatacttcttgaagctttagtgctattacaactaatgaatatgagtcattacattgtcctgcatctaatactcttgggattccaccaatatcacctaaatttaatttgttgtatttatattttgcacaacctgcagttaagataactgtatcttttggtaatttttctgcaaattctgtgtaatagtttcttgatttagctcttccatcacaacctgccattacaaagaatctctttatagcaccagatttaactgcatctaccaccttatctgctaaagctaaaacttggttatgagcaaatccaccaactatttgtcccttttctatttctgtaggagctttacatttcttggccatttctataactttagagaaatcttttgtcccatcagccttagcttctatatgagcacatccaggcattcctgtagcacctgttgtaaataatctgttcttataagaatcctttggtataactatacagttagtagtcataaggattactccattgaagctttcaaattcttctttctgtttccaccatgcattaccatagtttcctgcaaaatgactatattttttaaattttggatagtattgtccagcaagcatttctccgtgagtataaacatctaccccagttccttctgtttgctctagtaacatttctaagtctcttaagtcatgtcctgaaatcaatattcctggatttgttctaacaccaatgtctactgttgtaatttctggatgtccatagctttctgtgttggctttatcaagtaatgccataccatctacaccgaatttaccagcttctaatgctagtcctacataatcat

SEQ ID NO: 233 - DNA, 1335 bp, Clostridium beijerinckii
aataaattgaattattttgtcattatcgcacctttcaatatcatcaactactattattaatttattttcacctaacatctgcatcaacattttttctaaatatttttttgtttccctataatctttttctttttcaaatagacttttaataatatttgatttgacttttgctttagatatgacttctataattgatgatatatagtcttgaaattcactacatattccaacataataattttcttttttaaattcatctttaattctttgaaataaatacttaaataatgattccatgctatccatatccattgtgtttattcgtacaattttatgtttcttgttctcatttttatttagttcatttaatacaacacttacaaatgatgttttgccattgccccattctccagaaatacatattgacaatgattcattgacctcatgattattaatcaaattttccaaatgcttagcttgaaactttcttatttcaaataaatcttcaatgctttctattggcgaataatactttactgaattatctataccatttccttcaataacactatttttttctaatttaatactattaatacaccaaataaatatacctagtaatacaaaattcgctacattataccacttcgtaaattccacttgcctggtagctactgtcaggaacatgtccatatatataaaaatgcttataggaatagttaatgtattaaaatatgcatcattgttaacatatatcaataatccataagctattatactaaaaattattacaataaaaataaattcaaaactcaagattaattggaataaatcaactaaaaactcattgttagcagataaatcttttaaccaataaaatggtatcaatgatatatatgctaataaaattattatagtatttctcttactatattgaaactttactttgtatatattattataaaaacaacatatgattaaacctatcattaccgaaaagtaaaaaatcacaagtgaatatttcaccccaaaatcaccaaagtatataaatggatattgaaaactcatcttaccacttcttcctatataattattgatttgctaattcacattaataaattatatattatttaagacttataaattcattgttaatttaaatctaaaaataataaaaattctcgttaatatcatatattaatccattaatacttctccttaatttaaaagtctaagtgctcaaattataattatgataaattgtatgctaaatacttttcaactgccaattatagacattataagaatacaatattattatctataagactatat

SEQ ID NO: 234 - DNA, 1305 bp, Clostridium beijerinckii
tgttatttacaaaatgtgttataatatgttctgatagtagtttttgataaaacaagacagatttttgtttatagtagataaagggagtattttaaatgggatgtattaatattaagcgaatttggtcagatgaaaccatgattgaacttgaattttcagccaataatgcaaatatttattcacaattaaatttctttgtaactgaaaatgaattattagaaatttattaactgaggatcgtgcaagtgttcaaggaatagcttttagaaactagtgtaataatattataattttcaagtcgctggtagtgaaaataagaggtgaaatatgatggagtatataaaagcacataaatattcatctaatcacagaaatcaattgttaagagataaaaaatgtggttgcttttattgtttaaaaatttttagtccaaaagaaattgtagattgggttgaggatattggtggtacaggtatttgtccgtattgtggtacagattctataattagcgaaagttcaggatatcaaataacaaaagaattcctaatagagatgaaaaactattggtttaataaaaacaataatgaataatatatttaatatagtacattatcttaaagaaaatctgatatttacataatagttataatttaaaaaagataaattttgatttataaggaaggtgaatcatgaaaatatttttacgtatgcacccaaagaatcgtttatcctctgtacaaccaaaaaattaattttgtacagaggagtgcatattaaatgaatagattaaataagccaattattacgaaagaaacaatcaaagcaatggaggacatgtcattttttacccatgctatgatttttgacgatttactaattgttgcacaaaaagaaacgaattgctttgtattaaagacaagtgatgggctaatagtaatagatgctatttggccagcaaaggaagcttttgatgcaatagtatctgctattaaagatgtaggttgggatcctgatactataaaaaagctggttttaactcatggacatgttgatcatacaggctgtggaaaatggtttgttgagaaataccatgcttacacatatctttctaaaatagatgatattttttgggaggaacatccgactaagcctgatagaccagaaacgtggaaagattataaaattgatgtttatgttcaagatggtgataccataatattgggtgataaaacaatatatgtttatggtactcctggtcatactccaggaggattaagctatatattccctgtaaaagatgatggt

SEQ ID NO: 235 - DNA, 1184 bp, Clostridium beijerinckii
gcttttccaaagtgtccaaatgcaactgctccatgatgaggatatctgccttctactaatacgtgacgatagaatcttcccatttcaggaattgcaaatactcctatagctccaaatgaacgagttgcaactggtaatacttcaccttctgctacataagctgtaagttctgcatctgcattactttgtaatctgaagaatgtaatatctcctggtactatatctccttcaagtgttcctctagttatatttggttcttgatttggttcaagagctcttgccataatcatttggtttttcattgttccacatgttaatttacaagctgctgtattaccacagtggaatgccatgaatgtatcatttaatgaataattaaatttccctttaacttctgattcatacatatcagctggaactgtattgtttatatcaagtaatgttacaacatcttggcttatgcaagttccgatgtattcacttaatgcaccataaatatcaacttcacatgatactgggattcccatagctgttaaacggctgtttacataacatggtacaaatccaaattgtgtttggaatgaaggccagcatttatttgcaaatacaatgtattctcttgaacctttatgttcttccatccagtctaataatgtaatttcatattgagcaagctttggtaagataccaggcattttatttccttcacctaattctttttccatgctagctataacgtctgcaattcttggatcatctttatgatcattaaatgcagcaaataaatctagttctgagttttcttctatttcaacacctaaattgtataattgtttaataggtgcattacaagctaagaaatcttgaggtcttggaccaaaagaaattatttttaagttctttaatcctaataatgcagtagcaactggcacaaattcagaaatcattcctgcaacttctggagctgttcctactggatattctggaatgtatgctttaatgtttcttagagctaaattgtagcttgcatttaacattccgcaatatgcatctccacgtccgcctattaaattatctccgctctcttctgaagcagctgcaaacataactggtccatcaaattctttagcaagtaaagtttctgaagtttcaggaccaaagtttcctaaatatacaactaatgc

SEQ ID NO: 236 - DNA, 1154 bp, Clostridium beijerinckii
gctaaatcaaatattgcgctaagataagcctttttaccattaagtagtttaaattcagtaacagctgttagccatttttcatttggtttctttgcataaaattctctatttaatttgttttctgctgtaatttgtggagtactttgaatataatgctttctcttttttcttataactgatctcatgttaatagatttcattaatctataaattcgtttatgattatactgtttatccaggagtctatttatattcattgttatccgacggtatccatagataccatttacatcttcataaagtttaacaatctcttttagtattattgaattttccttatctaattcagtctctgaacggttaatccatttgtagtaagatgatcgtgcaatcccagctaaattgcatagatcagccattggatagccatttttttcatgtaattcttttatagaaatatatttatattcttggagtcttttagtgcttatcgccttctttctacttctttcaatttttttaagaaatcaatctccatctttaaacgtctattttctgcttcaataagttttaattgtgcggataatttatcagactcagtaatctcatcagtatctttacgcttaccgcgacggtctattagctcttcatatccattagctttgtattttcttacccaggtataaacttgttgataagaaacattaaatttatcagcagtagcttgataatcatcattattcgaaatgcagaatgcaacaatctcaattctttcttcataagtagtctttcttccattagtcataattctatccccttgcttattatgagatttaattgttttatgaccattatacttcttaatccaatcgctgagaacacgaggagatgaaatttcatatgtgcagcatatatttcttaaagagccttttccagctagataatctttaactgcattaagtttaagcgaatcgcaataatatttgttttttgtagaaactattaaatttgcttcaccaacatcattatatattttcaaccagtcataaaatgtggcactatgaattcccatctcatcgcatatctgtataactgctttttctcctgataggtattctttaattcctttcaatttctcttccagagaacatttc

SEQ ID NO: 237 - DNA, 1138 bp, Clostridium beijerinckii
aaattgaattagtgataatttaacatattttaaatttttagtcgtttcaacataagtaaattgaagcaaaacataagctatcaatgatatgaaaagttgattatagacagcattttcagttgttccaaatattctttttacattcaagttttgttttataaatttaaagaaggtttcaattttccaacgttccttgtatatttctgctattttttctggagtaatgttcattaggtcagtgcacacttttactgatttaccataataatcagtaaattcaactactctaaatctattttgagtttttttagtctcttttcctaaataacatgtaacatctcgaattacagaagaattttctactactcctaaacttctcaatttctttggttttgaaagtattgtattattttttattcttataacaaaagattgttttatttctttaaacatatcaaatctctcatgattttcataagccctatcttcaactaaaatagagtgtacatctattaaaccttcacctatcggtccatcatgctttttagcaatagtttcaataactttttgtggtgtaaagtcattaatatttaaagatatatgaagttttattccagatttcttcccattaaattttgcccatttaagacggttttcacctacggtcacggtagttgaatcaattgctattaattgttttggcaaatttagaattcttcgcattctacgattacatttagaaacaataatctcaaataaagttttagaaattttgtaatctaccttagaggcttttttagaaatagttgaataatcaactggtgttagccctactgattccatatgctcaacgccatccctataactcttatattcattcgtagctgctgcaataaagaattttattaaatcatataatgtgaattttcttgcagtatcaacatattctaaaattttactaaatttttcaacttccttttcacttaaaaatgtttgaaatatatcaaatatagtggtagtatttttcatgagggcattctccttaagtattattttggttcgcactttaatattactacagaatgacctcattttttatatattttcacttctattttttggttaatcaacacatatg

SEQ ID NO: 238 - DNA, 1117 bp, Clostridium beijerinckii
tatcggtcatcaggtagtatttagccttgggaggtggtcctccctgcttcccacaaggtttcacgtgtctcgtggtactctggtgcagaactgattatcatagttttcacttacgggactattacccactgtggtccaactttccagttgtgttcaattaactatgatttctcgttatgttctgtccgcaaccccagagataaatctctggtttgggctctttccttttcgctcgccgctactaagaaaatcgatttttctttctcttcctccaggtacttagatgtttcagttccctgggtataccttcataaagctatgtattcactttatgatacatggggtttcccatgtgagtttcctcattcggaaatcttcggatctctgactatgtgcgtctacccgaagcttatcgcagcttatcgcgtccttcatcggctcctgatgccaaggcattcaccatgcgccctttgtagcttgaccttttgcttgcttattgatgtcaattgcttcgtcgtctgctgagattttctcgttcacgtacatttaagtacgcttcactccaaaatttcatctactcctcgcacttgccaccaataagctgcgcaaattggcttacaaatatagtatatagcgatatatattataatttgctccaatttgtttttaatcatttcacaaagaatatttattcttggctttgttgtattttatatatacattaaatctatgtgcaattttcaaagaacatcttgcttgcttattaccgtcaattgcttcgtcagctacaaattttactcatttacgtacgtgaagtacgcttcatttcataaaattttcgctttctcgcacttgtcgctactaagctacgcattttgaaagacttagtctttcaaaattgaacagaacaaatacttaagtaacctttgagcaagtattttatattttgatacataataatgtatctgtactagtcagacatcatgctgatctagatttctccatagaaaggaggtgatccagccgcaggttctcctacggctaccttgttacgacttcaccccaatcgctgaccctaccttaggtcgctgccccgcttacgcgttagctcacgaac

SEQ ID NO: 239 - DNA, 1116 bp, Clostridium beijerinckii
aatataataggagaaattaattatgaattatactatttatgatttgatagagagacttattgatattgagaacaatgcattagaggtatataaaaaaattgaagaaaatgcaaaagaaaagaattctaaaaatattgagattattacaagagtgattagaaaggaagaaattaaacatatcaaatattatgagcgattaaaagagaaatttaactatgaactcaatgatactattgatttttacttatatgacaaagttgtaaagcttttatatgaatttaagagtcaaattagaattcctcatgtagacaatgttcaggatttaataaaatattcattagaatttgagaaaaatagcataagcttacttctagatatccggggaagattacttggaaacttaaatgatgtaaacaataatgtatataagattatctcaaatattatagaagaagaaaggagacatgagaaaatgtttagtgatttggttttgaaataatatttaagatataacttctaggaaacattaatatatgcattgaagtatagtaagtctattagtaaactatttctagtgtgtcagtataaataaaatttagaataatgacatatagcagagaaaagtatgaataatcttataaaattaggggataatttaaaatgtaagtaatttagaagtgttaagataaaaaacgtcgctaagagatgtaaacaaaaaaactcaagtttacaagatatttgaaatgtaaaattataagttttgtgaaaaatgttgacaatattgaatagcgatggtatgatttaattcgttgctgaagaggatgaaattcaataacttaaagctaataaaacatctaagaaaaaaatgtttgaaaagtttagaaaaaggttgttgacaaagtctgaaagcgatgatatactgaataagctgtcagaaacgacagaaacttgtaagtcttgtaataacaggatttagaaggaaaaattggtctttgaaaattgaacagaataacataaatacatttaagtaaaccagcaatttttatttgagtaagctaagattaaactttttattgagagtttgatcctggctcaggacgaacgctggcggcgtgc

SEQ ID NO: 240 - DNA, 1075 bp, Clostridium beijerinckii
taacgtgagttcgaaaagctagaatattttatgggtaaatatggttatgaaaaaaagcaaaaaagtatccttgtaatcttgtggctcgatattccaattattccatagttagatatttgtccaacttaagagaaggtttcttaggaagaaaactatacgaaatcaatcctgaaactatattaaccgcaaaattagtaaaacttctatgtcgattatgctctatctgacatatattttttagttggtcatttattgtttcaatgatagctcttttcctaagaagaattttatcctccattaacattaatttatttttcatgtttttctttatctttgttataagttgaatacctttggaatacaaaatatcggagatctttttagataaataacctttgtcaccaaaaagttttccaaataaatcttttgctaatatttctatagtcttaatttctctatcatctacatttcccggagttagataaaaagagagaatatcccctttatcgttaacaacaagatgaagcttaaaaccataaaaccagcctgttgaacttttaccacgttctgcaattcctttaaaaaccttatgagagtgtattcttctattatggcatacattcaaagttgtagaatcgataaaagaaattcctgtgcacttgccagttctaaatttcatcatgtataatagtaatgcaactaatgattgttgcattaattcaacaaacctattgtagctcacaagcttaggaaaatacggtttgagaacagtagacacatgctcaatatagtatgatttaaaagttctgtaatttgacaaatgaaagtagatagttattgtcataacttcgcttaatgataaagttttacttttaatcattgcaaatttgcggtcgctattttccgttaggaaatgacttttacagtaattttcaaatccaatacaaaaattgtctacatcataaaatatttctactaataagttttgcataaaatcccatcctttgttttatttatttggtcgcacttatataataaaacattttgatgggattttttatcccttaaatttttc

SEQ ID NO: 241 - DNA, 1075 bp, Clostridium beijerinckii
atttgcagttcatggaatagaaacagaaataatagcagcaagcgtaagaaatccaattcatgtaatagaagcagcaaaagcaggtgcagatatatcaacagtgccttatagtttagtaatgcaaatgttaaaacacccattaacagatcaaggattagaaagattcaaagcagactgggcagcagcatttggaaaatagattgccgaaataagaaacatattttggttccggttcctaagaaattttgttgagtgcttctaagattataagttgtgcccaaaatgcttgcctcaaaggtaaactttgaacaagcacatttggaacaacttataatcaagaagtactaccaacacaatttctaatgaacactccacaaaatatgttacttatttctagtgcagacatatttcgaaaatggaagagtaatttagagatataatgcctagattctgaaattgggaaagtgtaaatgtttatggtaaatattctgatataacgcttccacaaaagcatgaccatcatttctgatttagatatttttcaaagtatagtaataatataaagagtaatatctatgcgatacattttaaaaatacaagagtaatttatagatatgatggctagattctgaaattaggaaggcataaatgtatatggataaatattttgatataatgctttcgcaaaagtatgactatcatttatgatttattcatgttccaaatgacagagataaaaatatatattcttaagaatataagaatataggaatataaggatttaagaatataaggatttaagaatataaggatttaagaatataagaatttataaatgaaaacataaagcaatttcaaaaggtgtggtaaaataggcaccttttgaaaagataatgaaggatagctaagattatttcaggtttgaaatgaattcgaagcgcagcatttgacttaattagcacaactaagaacttataaaaaaatatgtctatgaaatgaggataaagatgagtagagaattagataaattatctattaacgcaataagagtattatcagcagatgctattgaaaa

SEQ ID NO: 242 - DNA, 1067 bp, Clostridium beijerinckii
cttcatatactttttatctgtagtttatagaggtaataaattcataaaaaaatagccttagattccactaaagctattcatttataaattttataaatttttcctttttcataaaaattgacgcatatatacttgaaactgcaaaaaaaatattgattattggcacaatactaataacaagtatggttatcagtagacctcttttttccttgttaccaaaaatattaatattattcttgtttaaaacaagcctaaataatagtaatattaaggataaacaacttaactttattgatatagtatataaatataacatattattcaactcctttgagcatatgtttaattgccttcttttacattttataccatattgtaaagtaattccatataaatttttagccatctatctcattttattttcattatttttcagaatctcatctatgcttctaatttcttttattctcttttatttttcatatatttcgcttgaatataaattcatatataataaaaaaagctagtagaataaatagtaattaactatattctactagctttcactttaggatggatggtaatttaagaactgagttaaaacattaagtatctatttttagagactttgttcgtaactttctatcattctcttaaccatttctccgccaacactaccattttgtcttgaagaaaggttccctttatcaatgttttcatagttatttaacccaatttctgaagctacctcagtttttaatctgtttaaacctgtttttgcctctggaactaaagttttatttctcgaagccatcttaatctacctcccttaatctatgattttgtttggcattaatatattaaccactctcacaaattttaatctatgcaaatacttgtaaaaaaagtgttaaaatcctcctttccattaattcttcactaggcgtttgcgaaacgccgcaacccgcagaaatgcgggatatttttttagcaaaataaaataactcctcactgatttatggtaaaattgaattgcctaaaaacaaaactaccatatacctcagaaa

SEQ ID NO: 243 - DNA, 993 bp, Clostridium beijerinckii
tatatgattcaaataatatttcaattgaaggaaatacagacatagcatttagagaagatgtagctaagagatacgaagcttatggatggcaagtactaaatgtagcagatggaaatgatatagatactatagaaaaagcaatagaagcagctaaagcagaaacaacaaaaccatctattataatagttaaaaatcaaattggttttggttgtccagctaaacaaggaaaagcttcagcgcatggtgaacctttaggggctgaaaatgtaactgctatgaaggaaaacttaggatggaagacagagccagcattctacgtaccagacgaagtgtatacaaatatgaatgaacacatagcaaaaggtgaaaagactgaagctacttggaatgagctgttcaaagcatatgcaaaagcttatccagaactttcctcagaatatactaaatggatgagtggagaacttgataaagaagctttattaaacaacgaagaactttggagctttgataaagaaatggctacaagagaatcttcaggaataatgataaatagattggctaaactaattccaaactttattggaggatcagcagatttagctccatctaataaaactcatatgaacgatagaggagatttctcagcagaagatagaagtggatcaaaccttcactttggagttagagaacatgctatggcagctatcgctaacggaatgtatgctcatggaggacttaaagtattttgcgcaacattctttgtattcagtgattatatgaagggtgctatgagattatcagctcttatgaatcttccagtagcttatgtattaacacatgatagtattggagtaggggaagacgggccaactcatgaaccaatagaacaattagcagctcttagaagtatgccaaatatgacagtatttagaccagcagattcgaaagaaactgcagcagcttggtactatgctgtaactaatggaactactc

SEQ ID NO: 244 - DNA, 993 bp, Clostridium beijerinckii
tatatgattcaaataatatttcaattgaaggaaatacagacatagcatttagagaggatgtagctaagagatacgaagcttatggatggcaagtactaaatgtagcagatggaaatgatatagatacaatagaaaaagcaatagaagcagctaaagcagaaacaacaaaaccttctattataatagttaaaaatcaaattggttttggatgtccagcaaaacaaggaaaagcttcagcacatggtgaacctttaggagcagacaatgtaattgctatgaaggaaaacttaggatggaagactgagcctgcattctacgtgccagacgaagtgtatacaaatatgaatgaacacatagcaaaaggcgaaaagactgaagaagcttggaatgagttgtttaaatcatatgcaaaagcttatccagaacttgcagcagaatatactaaatggatgagtggggaacttgataaagaagctttattaaacaatgaagaactttggagatttgataaagaaatggctacaagagaatcttcaggaataatgataaatagattagctaaactaattccaaacttcattggaggatcagcagatttagctccatctaacaaaactcatatgaacgatagaggagatttctcagcagaagatagaagcggatcaaaccttcactttggggttagagaacatgctatggcagctatcgctaacggaatgtatgctcatggaggacttaaagtattctgtgcaacattctttgtattcagcgattacatgaagggtgctatgagattatcagctcttatgaatcttccagtagcttatgtattaacacatgatagtattggagtaggggaagatgggccaactcatgaaccaatagaacaattagcagctcttagaagtatgccaaacatgacagtatttagaccagcagactcaaaagaaactgcagcagcatggtattacgctgtgactaatggaactactc

SEQ ID NO: 245 - DNA, 979 bp, Clostridium beijerinckii
acttacacctctgacctatcaaccttgtagtcttcaaggggtcttactagcttatgctatgggaaatctcatcttgaggtgggcttcacacttagatgctttcagcgtttatcccttcccgacttagctacccagctatgcttctggcgaaacaactggtacaccataggtcagtccatcccggtcctctcgtactaaggacagctcctctcaaatttcctacgcccgcgacggatagggaccgaactgtctcacgacgttctgaacccagctcgcgtgccgctttaatgggcgaacagcccaacccttgggacctacttcagccccaggatgcgacgagccgacatcgaggtgccaaacctccccgtcgatgtgaactcttgggggagatcagcctgttatccccgaggtagcttttatccgttgagcgatggccctcccacgaggtaccaccggatcactaagcccgactttcgtccctgctccacttgtaggtgtcgcagtcaggctcccttctgcctttacactcttcgaacgatttccgaccgttctgagggaacctttgggcgcctccgttacattttaggaggcgaccgccccagtcaaactgcccacctaacaatgtcctgtcaccagtttcatggcatccagttagaacttcaatactatcagggtggtatcccaacaacgactccaccaaggctgacgccctagtttcccagtctcccacctatcctgtacagacaataccgaaattcaatgctaagctacagtaaagctctacggggtctttccgtccaatcgcgggtagcgagcatcttcactcgcactacaacttcgccggatttgcagttgagacagtgcacaagtcattacgccattcgtgcgggtcagaacttacctgacaaggaatttcgctaccttaggaccgttatagttacggccgccgtttactggggcttaagttcacaccttcgcg

SEQ ID NO: 246 - DNA, 972 bp, Clostridium beijerinckii
atttttttagatataaaaaatgtgaattccgaagaactcacattcattgtataatttacttatgctaaaaaccaaattacacaataaagattatactgagattaatgataattttcaacttatattaccattaaatctagaaaatttaataccatcagatgattcagtccgcttgctaagccatgtattggagggattagattacacgaagttgtataaggcgtactcttccgttggaagaaaaccggcagtggaacctaaaattatgttcaaaataatatcatatgcttattctcaaaatatttattcaagcaggaaaatcgaaaaagcatgcaaaagagatataaattttaagtggttacttcaatgttataaggcaccggatcatgctacaatcagtagatttcgtaaagactatatttcaaatgaggtaattgaagatttattttatcaacaagttaattatttagcaaatcaaaatgaaatactatttgaaaatgcatttattgatggtactaaaatcgaagcgaatgctaatcgttatacatttgtttggaaaaaaactattttaaaaaatgaagaaaaaatgtttgataaaattcttgttcttttagaaaatattaaccttggagaattaaaaaaatttactgttcagaaagaaacattaatagatgatattgataaaattcttcaatggcttgaatatgaaaaaaagaaaagaaacatagagtttgttcatggaattggtaaaagaaaaaccaaaattcaaaagtggacagagcaactatctgaatataaagagagagaagaaaaatataatttgagtaaaaaaatattttcaaaaagaaatagttattctaaaactgatccagacgcaactttcatgcatatgaaagatgatcatatgagaaatagtcaattaaaacctgcatataatgtgcaaatcgcagttgaaagtgaatacgtaaccgg

SEQ ID NO: 247 - DNA, 964 bp, Clostridium beijerinckii
gtggtagtatttttcatgagggcattctccttaagtattattttggttcgcactttaatattactacagaatgacctcattttttatatattttcacttctattttttggttaatcaacacatatgacaattttccaaaaataaaaaacaatctcctcattttttaataggagactgtttttcatttagtatcattcactaaatcaatattttttctaatttattgtatcaacgctatcaaacattgctgtcatttcgataaatacttgtttcttgcaacaaaactctctttttgaaatatggcaattagcaatctctttgctcgagttatcagatttatatttctccagcttttcttgaagttcttcaagacataaatcgtgaattgctttaataatatcttcttcccatatacaagctgggtaactatttatcacttttattttcattaatttaacctcgtattaataatggggtgtaaaatctaataaatattaactactgaataatatttattatataataatcagatgaaattaatattgtgaatgaaacatctttgtattgtaaattactaccctttagcatattatgatttaaataaaattagaaatcccctgtaaagtcatcatcaatttacaggggatttactgttagtaggtatagtaaaatataggagtgttatgtaaccacatattaaggggtatatgggaatcaatttttacacactcaatatattattcgttaataaatataattttctgacataaaacataaatttttctgataaaaagtatattctcattgttatcaatcataaattttattatccctttattagataattgcgaaactcattgataaaaatgaataatgattgatttgaagttgcaaaaacattattaatggatttaatggttcctgctatacaaatataatagttgacttcttaaaaaagggcgca

SEQ ID NO: 248 - DNA, 928 bp, Clostridium beijerinckii
tgcactaagtgaattgtttagtgcaattttttgttttaagaaaatgaaatatagtttataattaaagtaagaaacaagggagtgatatggtgaaagagaataaagtatatcatgaacatgatgtaggctataagcacatattttcacataagggtacttttttagaatttttaagaagttttactaaaaagggatgggcagacttaataaaagaagaggatttaatattagtagataaatcttatatactttcagattttgaagaggaagaatcggatatactttatagggtaaacataaatggagaagaagtaatattttatgtgttactagaatttcaatcgaaagtagactttcaaatgccaatgaggttgctgttttatatgacagaagtttggagagatgtactaaaaaatgcggataagagtgaggttaaaagaaaatcttttaggctaccagcagttatcccgatagtgttatacaatggaaaaaataaatggacagcaaagacaagttttaagcaaatattaagtggatatgaattatttgaagataatatattaaactttaattatatgctatttgatataaatagatattcagatgaagagctatatagtgtatctaatttagtatcagcagtatttttattagatcaggaaatggatgaagatgaattaataagaagactaagaaaattaatatatattctaaagaaaatttcgccggaacagcttagtgtttttaagcaatggctcaagaaaatagtaaagcctagattaactgaagaaatgcaaaaagaagttgatgaggtattagataaatctaatcaggaggaggtagattttatggttagcaatttaggaaagactttagaaaagatggaaagaaaagcaacagaaaaaggaatagaaaaaggaatagaaaa

SEQ ID NO: 249 - DNA, 905 bp, Clostridium beijerinckii
ctactcaaaatacagacatttaaataaagggattaaaatattatatattttttgctaaagattttattagaagaaagataaaataaattaataaaaatagtatgagtaaaggaagacgataaacacttagaaatcaaatgtttattgtctttctttatgataggcatcattagattgatttgtatttataataactctaaacttaattgatattcttgtaatttatttatcaattaaaaaagatacactattaatttatttctctaagtgaataagcaagtataatgctacttggcaaaatactcgttattgattataagattaattaaatatgccgctttcataataaattaatatactcataatagatatacgtttatataaatattaagataaatatactaagttttcatagaaaagtatgacatagataatacattacctatagaggatgcaatagaagaatatggccaatgtttcaaggagtaatgctgatacttaatttgatagttaataaaataaattataaagaactaatcaggtttaaagttatacaagcctaattaatatgcagtaagataaaatataactaggaatcctgtataaaataaataggatagacaagaaatgggattagctatggttgtaattatattggatattagagaagataagttgtaaataaattataaagcaaatttgaattttaactataatctatgagtagattatagaacaaataaaagaaagtttattaaagtgaaatagcaggaggatgtaattaaaaataacttgaaattaaaatatagcttaaggcaagaagtgaaagtgctgtattattctagagtgaattatacagcgttattaattatatatgaaaattaataattaaaatgctatatatc

SEQ ID NO: 250 - DNA, 889 bp, Clostridium beijerinckii
atttgcagttcatggaatagaaacagaaataatagcagcaagcgtgagaaatccaattcatgtaatagaagcagcaaaagcaggcgcagatatatcaacagtaccttatagtttagtaatgcaaatgctaaaacacccattaacagatcaaggattagaaagattcaaagcagactgggcagcagcatttggaaaatagtccgtcgaaataagaaacatattttgattccggttgctaagaaattttgttgagtgcttctaagattataagttgcactcaaaatgcttgcttcaaagacaagctccgaacaagcacatttggaacaacttataatcaagaagcactaccaacacaatttctaatgaacactccacaaaatatgttacttatttctagtgcagatatatttcgaaaatggaagagtaatttagagatataatgcctagattctgaaattaggaaagtgtaaatgtttatggataaatattttgatataatgctttcgcaaaagtatgactatcatttatgatttattcatgttccaaatgacagagataaaaatatatattcttaagaatataagaatataagaatataagaagttaagaatgaaagaatttaagaatataggaatttaagaatttataaatgaaaacataaaacaacttcaaaaggtgtggtaaaataggaaccttttgaaaagataatgaaggatagctaagattatttcaggtttgaaatgaattcgaagcgcagcatgggacttaattagcacaactaagaacttataaaaaaatatgtctatgaaatgaggataaagatgagtagagaattagataaattatctattaacgcaataagagtattatcagcagatgctattgaaaa

SEQ ID NO: 251 - DNA, 880 bp, Clostridium beijerinckii
ttctagagtgaattatacagcgttattaattatatatgaaaattaataattaaaatgctatatatcagtaatagaaattatttgtatatttaattagacgtgctataatttaatttctgtattttcttttaatttattattattaaataacttcacattatagataagaaattaaaagcttttatcctgattattaagttgtgagcaacgattaaattccatttctaatacagtgtttaccgtatgtttgcctagattatctaaagaattatatttttttaataaacattctaattcttctgatagttgtaaagatgtttttattttgttttcatcccatcccattaaaatagatggagttgtttctaatattgctgcaagtttttcgattttgtcagaaggtatattagagattacaccactttcatatctttgaagtgttggcttactaatagataatcttttagaaacatcttctaatgtgagattcaattctaatcgtctattcttgatattttctttcaaacccattttatatcacctcttagttctatattaaaagtaagtaaattacagattatcaatttatatataatttattgataacctatagtaaaatcgaagcgtcctaataaagcttaataactttttatttattttgtttactgcaataaagtaaattaaaaaatcattctaatttggaaactattaatataatttatttacaatggctaacaaaataaaaatatttagataagttctggtaataaatattagcatttaatttttaattaaggtcaatcaattaaagagttattataaatcagaataatcaattgtatttaatttattggttaaagtctataaattaagacagtgt

SEQ ID NO: 252 - DNA, 874 bp, Clostridium beijerinckii
atttgcagttcatggaatagaaacagaaataatagcagcaagcgtaagaaatccaattcatgtaatagaagcagcaaaagcaggcgcagatatatcaacagtaccttatagtttagtaatgcaaatgttaaaacacccattaacagatcaaggattagaaagattcaaagcagactgggcagcagcatttggaaaatagattgccgaaataagaaacatattttggttccggttcctaagaaattttgttgagtgcttctaagattataagttgtgcccaaaatgcttggcctcaaaggtaaactttgaacaagcacatttggaacaacttataatcaataagcactaccaacacaatttctaatgaacactccacaaaatatgttacttatttctagtgcagacatatttcgaaaatggaagagtaatttagagatataatgcctagattctgaaattaggaaagcataaatgtatatggataaatattttgatataatgctttcgcaaaagtatgactatcatttatgatttattcatgttccaaatgacagagataaaaatatatattcttaagaatataagaatataagaatgaaagaatttaagaatataggaatttaagaatttataaatgaaaacataaaacaacttcaaaaggtgtggtaaaataggaaccttttgaaaagataatgaaggatagctaagattatttcaggtttgaaatgaattcgaagcgcagcatgggacttaattagcacaactaagaacttataaaaaaatatgtctatgaaatgaggataaagatgagtagagaattagataaattatctattaacgcaataagagtattatcagcagatgctattgaaaa

SEQ ID NO: 253 - DNA, 788 bp, Clostridium beijerinckii
tctaactgtgcttttccttcttctgttttatacatagcttgtcttctcattgattcatcgtaatttactaaatgtccatcaaattctggtccgtcaacacaagcaaacttaacttctcctccaacagtgactctacaagcaccacacatacctgtaccatcaaccattattggatttaagcttactgttgtttgaattcctaattctttagttagcatagaagtaaatttcatcattatcattggtccaataataattgcatgatcatatttcttaccttgattattaactagctctttaagcatatctgatccagttcccttaaattcatatgaaccatcatcagttgttacataaagatttccagcagcattctttaatttatcttcatatattaataaatctttgtttctgcttcctaaaataacatctacagctattccatgttcatgcatccattttacttgtgggtaaactggtgctgcaccaactccgcctgccacaaagatgaaattctttttctttaattcttctatatcctcatgtataaattcacttggtacacctaatggtccaacaaagtcagctacatgatccccttcattaaaagcagctaactgttttgttccttttcctacagtttgaaagactatagttactgttcctttttcctgatcataatctgctatagttaaaggaattctttcacctttttcatcattttttataataataaattgtccaggctttgcagattttgctactcttggagcttctatatccattga

SEQ ID NO: 254 - DNA, 784 bp, Clostridium beijerinckii
attgctgtaaataaagatgattcagctccaataatgaaaattgctgactatgcaatagttggtgatcttactaaagtagtaccagaattaatagctcaagttaaagaaataaagagcgctgaataatataatttattaattaaaatgatttaatccgtagttagaatgtatagattaaaataataggaggttaaaataatgcaaggattaagtattgataagataaaagtaggagacaaaacttcagtcgtaaagactattggtgaatcagatgtatatttatttgctggaattactggagatttaaatccagcacatacaaatcaagttacagcaaaagaaacaatatttaaagggagaattgcacatggtatattagtatcaggtcttatttcgacatgttttggtatgcagcttccaggaccaggtacaatttatttatcacaaaaccttaaatttactgcaccagttcactttggagatacaataacagcagaaatagaggctatagaagtgattgaagatagaaatagagtaaagttcaagacagtatgtactaatcaggacggaaaagtagttattgacggcgaagcaatggttatgccacctaaaaaaacagcataaatgattaaagaactgaataaatagaatataataacaaaagtcttttgcattagtttgctaaaagacttttgttattgtatatatatcaaaatttgacgattctttataatttttcttaagtgtagtataataatattcaaatataagatatatttggatt

SEQ ID NO: 255 - DNA, 775 bp, Clostridium beijerinckii
gttctaacaccaatgtctactgttgtaatttctggatgtccatagctttctgtgttggctttatcaagtaatgccataccatctacaccgaatttaccagcttctaatgctagtcctacataatcatcaactgttaatgtatcatcaattgtagcagcaagagcttttgccataaatgcatgaacttcttcattattgtattttaaattcatagcatgcttcatgtatgctgataaaccttttaatccataagtgataagttctcttaagcttcttatatcttcattttcagttgcaagaactccaaccttttctgctttttcatcaaattctattgtattgtcagctgtccaagtagctgcttctggcataatcatttctgtagtttgcattccgaatattttcttgaagaaaccaccagttacttttacttctccaactttaccaccagagctaattactttagcttttaattcttctcttaattttaaagtttctttaactctatctaaaatagaatctctatcaaaattagcgtttgtaattgttgtaaataagttttctgttatatatttatcaactttactatcctttactccaacttttcttccttcattacttactatagctagtcctttagttacatatattaataagtcttgagcttttgctacatactcatccttaccgcatacccctactttagtacagcccttacatccagctgtttcttgacattgataacaaaacattgacatattatgtcctcctattt

SEQ ID NO: 256 - DNA, 753 bp, Clostridium beijerinckii
aaagtcgcttaattttattccaatttctgtaaccgttcgtgttttaaaacggtttgtttgccatactctttttccaaaaactatttttttgaaaattaacttgactattattagctggtctttttaaataatgctcttaattaattgctattgcttacttgattatagtttttttataatgcttattataacataatttacaaaacaccatgtattctatacgaatacttcatctgcttcaataacaccatcaacatatacctcacctaaaaatgtgcttatacaatcaagaagataatatcttgattagtaataatttaaaaggggccactgacaatttgagagtgaaatttcctttaaaatcctcacttgttattttaaagtatactatttcaaatctaccatgaaacaataaaaaaatcgcaggcgactgtggttaagttccgtattgtgcttcgcactcttttcatatgtgtagattttttttacgcatctgcctttccgaacgcatgtgaggaaaatctggcaggcgaataagatttcttttttattctttttctatacaaaaactaattaaatagccttcttcataagttatccacagattctattacattataaattcccacaagtgttgattaaccaaaaaatagaagtgaaaatatataaaaaatgaggtcattctgtagtaatattaaagtgcgaaccaaaataatacttaaggagaatgccctcatgaaaaatactaccact

SEQ ID NO: 257 - DNA, 745 bp, Clostridium beijerinckii
ctcattcggaaatcttcggatctctgactatgtgcgtctacccgaagcttatcgcagcttatcgcgtccttcatcggctcctgatgccaaggcattcaccatgcgccctttgtagcttgaccttttgttcgtttactaatgtctattacttcgtcaacttcaaaaattactcactctcgtacgtttaagtactgctcatttcataattttctcgtttccttgtactagccattattaaacttcacaaattagtacgcattttagtatctactacaaaaattacgttatccaatttggtttaatcatttcacaaagaatatttattcttggctttgttgtattttatatacattaaatctatgtgcaattttcaaagaacatcttgcttgcttattatcgtcaattgcttcgtcaactacaaattttactcatttacgtacgtgaagtacgcttcatttcataaaattttcgctttctcgcacttgtcgctactaagctatgcttttttgaaagacttagtctttcaaaattgaacagaacaaatacttaagtaacctttgagcaagtattttatattttgatacataacaatgtatctgtactagtcagaacgtctgtctgatctagatttctccatagaaaggaggtgatccagccgcaggttctcctacggctaccttgttacgacttcaccccaatcgctgaccctaccttaggtcgctgccccgcttgcgcgttagctcac

SEQ ID NO: 258 - DNA, 743 bp, Clostridium beijerinckii
ctcattcggaaatcttcggatctctgactatgtgcgtctacccgaagcttatcgcagcttatcgcgtccttcatcggctcctgatgccaaggcattcaccatgcgccctttgtagcttgaccttttgcttgcttattgaatcttatcacttcgtcagctgcaaaaattattcattcgcgtacatttaagtactgctcatttcataatttttttgcttcctcgtgctaagctccaataagctgcgcaaattggttcgcatttatagtatatagcgatatatattataaattgctccaatttgtttttaatcatttcacaaagaatatttattcttggctttgttgtattttatatatacattaaatctatgtgcaattttcaaagaacatcttgcttgcttattaacttcaattgcttcgttagcttcaaattttactcatttacgtacgtgaatgagtaaaattctcgctttctcgcacttgtcgcgactaagctacgcgttttgaaagacttagtctttcaaaattgaacagaacaaatacttaagtaacctttgagcaagtattttatatcttgatacaaataatgtatctgtactagccaaacatcatgttggtctagatttctccatagaaaggaggtgatccagccgcaggttctcctacggctaccttgttacgacttcaccccaatcgctgaccctaccttaggtcgctgccccgcttgcgcgttagctcacgaac

SEQ ID NO: 259 - DNA, 738 bp, Clostridium beijerinckii
ggcagcgacctaaggtagggtcagcgattggggtgaagtcgtaacaaggtagccgtaggagaacctgcggctggatcacctcctttctatggagaaatctagatcagcatgatgtctgactagtacaaatacatcattaatgtattaaaatataaaatacttgctcaaaggttatttaagtatttgttctgttcaattttgagggattttccttcagaataggggcttatagctcagctggttagagcgcacgcctgataagcgtgaggtcgatggttcgagtccatttaagcccaccaatgttctttgaaaattgcatataataaatgtatataaaatacaacaaagccaagaataaatattctttgtgatatgactaataattaggtcaagctacaaagggcgcatggtgaatgccttggcatcaggagccgatgaaggacgcgataagctgcgataagcttcgggtagacgcacatagtcagagatccgaagatttccgaatgaggaaactcacatgggaaaccccatgtatcataaagtgaatacatagctttatgaaggtatacccagggaactgaaacatctaagtacctggaggaagagaaagaaaaatcgattttcttagtagcggcgagcgaaaaggaaagagcccaaaccagagatttatctctggggttgcggacagaacataacgagaaatcatagttaattgaacacaactggaaagttggacca

SEQ ID NO: 260 - DNA, 730 bp, Clostridium beijerinckii
gacttaattagcacaactaagaacttataaaaaaatatgtctatgaaatgaggataaagatgagtagagaattagataaattatctattaacgcaataagagtattatcagcagatgctattgaaaaatcaaaatcaggacatccaggtttaccacttggatcagctacaatggcttatacattatggacaaagatgaatcataatggaaagaaccctgaatgggataacagagatagatttgtattatcagcaggacatggttcaatgcttgaatattcattgctacatttatttggatatggacttacagttgaagatattaaaaactttagacaattcggaagtttaacaccaggacatccagagtttggtcatacaaaaggtgttgaaataacaacaggaccacttggacaaggtatttgtaatgcagtaggttttgctatagcagaagcacatcttgcagaaaaattcaataaaccagattatagcgtagttgatcactatacatatgctatagttggagacggatgccttatggaaggtatctcaggagaagcgtcatctcttgctggaactttaggtcttggaaaattagtcgtattatatgattcaaataatatttcaattgaaggaaatacagacatagcatttagagaggatgtagctaagagatacgaagcttatggatggcaagtactaaatgtagcagatggaaatgatatagatac

SEQ ID NO: 261 - DNA, 724 bp, Clostridium beijerinckii
ggaactaatcctggcattaagctgtctagtacactttgaatagttgtaactacttcttttccatcagcttgtgtatatttagagagaacaaaaggtatattaacagttgtccattttgaaacaagaccacctataacaagtaatccaagtactgaagcaccttctgtaagatatctaagtttatttcctcccatatcagcaactaattgagttcctttttcatatccatagaacattccataccagtttgttgcaagtcttattgcattgaatcctatgaagaaaattaatggtccaattatacttcctgtaagtgcaagtcctgcccctaatgctgcaagcacaggtcttagtgttccccagaatattgggtctccaactccggcaagtggtcccataagaccaatcttaacaccacttattgatgcctcatctatatctgccccatttgccttttgttcttccatagctgctgttattcccataattggcgttgccataaatggttgtgtattaaagaattccaaatgtcttttaagtgctgcacttaattcgtcacctttatataatttcttcaaagctggaattaatgtaacacaaaaacctattgcttgcattctttcaaaattaaatgatcccaataagaaatttgaacggataaacatttttactatatcacttttatttaatttcttttcactcattattttatctcctttctgta

SEQ ID NO: 262 - DNA, 717 bp, Clostridium beijerinckii
gtccgcctattaaattatctccgctctcttctgaagcagctgcaaacataactggtccatcaaattctttagcaagtaaagtttctgaagtttcaggaccaaagtttcctaaatatacaactaatgcatttactccagcttctttaacttcagctaaagcttttctcatatctttttcattttcaacagttgtttgacattcaaaaatttctccattaaaagcttctactactgcttttcttctattttctgataattccattgggaaacaatctctacttactgcaacaattcctaattttacttgtggtatattattcatttttaactcctccattttttatgaattttaaattcttataatcagatcttgacaaattttacgaagtatattattcgatattttaatgctacaaattagatttattaagttagatattaattaatatcctattcctaaataattgaatctagctattattttacatagcctgtccgagttttaaatttagctttagtacttgttaatgtttcactttaaatatattttaaaataactttttaaatgttgtttgataagtctataataaagcttttatattaattagtcaatacctttttgtatacattttcataattaatttttctaatagttatatactgtaaaatgcataaatttttatctatttattcaattgctgtaatatgtaaactttg

SEQ ID NO: 263 - DNA, 685 bp, Clostridium beijerinckii
tggagaaatctagatcagcatgatgtctgactagtacagatacattattatgtatcaaaatataaaatacttgctcaaaggttacttaagtatttgttctgttcaattttgaaagactaagtctttcgtaaatatgggggtttagctcagttgggagagcacctgccttgcacgcagggggtcaagggttcgaatcccttaatctccaccatgaagatttaattaaatataattaagtcttaaaatgttctttgaaaattgcacatagatttaatgtatataaaatacaacaaagccaagaataaatattctttgtgatatgactaataattaggtcaagctacaaagggcgcatggtgaatgccttggcatcaggagccgatgaaggacgcgataagctgcgataagcttcgggtagacgcacatagtcagagatccgaagatttccgaatgaggaaactcacatgggaaaccccatgtatcataaagtgaatacatagctttatgaaggtatacccagggaactgaaacatctaagtacctggaggaagagaaagaaaaatcgattttcttagtagcggcgagcgaaaaggaaagagcccaaaccagagatttatctctggggttgcggacagaacataacgagaaattatagttaattgaacacaactggaaagttggacca

SEQ ID NO: 264 - DNA, 674 bp, Clostridium beijerinckii
tgatgtctgactagtacagatacattattatgtatcaaaatataaaatacttgctcaaaggttacttaagtatttgttctgttcaattttgaaagactaagtctttcaaaatgcgtagcttagtagcgacaagtgcgagaaagcgaaaattttatgaaatgaagcgtacttcacgtacgtaaatgagtaaaatttgtagctgacgaagcaattgacggtaataagcaagcaagatgttctttgaaaattgcacatagatttaatgtatataaaatacaacaaagccaagaataaatattctttgtgatatgactaataattaggtcaagctacaaagggcgcatggtgaatgccttggcatcaggagccgatgaaggacgcgataagctgcgataagcttcgggtagacgcacatagtcagagatccgaagatttccgaatgaggaaactcacatgggaaaccccatgtatcataaagtgaatacatagctttatgaaggtatacccagggaactgaaacatctaagtacctggaggaagagaaagaaaaatcgattttcttagtagcggcgagcgaaaaggaaagagcccaaaccagagatttatctctggggttgcggacagaacataacgagaaatcatagttaattgaacacaactggaaagttggacca

SEQ ID NO: 265 - DNA, 665 bp, Clostridium beijerinckii
acttaatattttcaattgcaactttgcagttagcatattgctttacttacatatataaaaattatacattgatttaactttattataataaaaaaagaatgatctattattgtgaatagaccattctgaatactggttaatatttatttaatagtggataaataatgtttaactactttgtttttatatattacaagagatttgtgacagtactatggcaaaattgaactttcttgacctggcattatacttataatctttccagcagatcataactcaatgtcctaaacacctgacaataattttgaaatccatcttgtccgacaatataaatattaggcatataatccattcttgcttttgaatatataatacgctccaagccattatctatagctgtatgattacttagagccacatctacttttttactaattgcttcactaataaaataatctaaggacttaagatattgttttacttcattttttgtccatggtggagttgtagccccccataatgctgccatgtggattttaccatcatcttttacagggaatatatagcttaatcctcctggagtatgaccaggagtaccataaacatatattgttttatcacccaatattatggtatcaccatcttgaacataaacatcaatttta

SEQ ID NO: 266 - DNA, 620 bp, Clostridium beijerinckii
ggcagcgacctaaggtagggtcagcgattggggtgaagtcgtaacaaggtagccgtaggagaacctgcggctggatcacctcctttctatggagaaatctagatcagcatgatgtctgactagtacaaatacatcatagtatgtattaaatatttaaatacttgctcaaaagttacttgaagtatttattctgttcaattttgagggattttccttcaaaaagcctcatgggggtttagctcagttgggagagcacctgccttgcacgcagggggtcaagggttcgaatcccttaatctccaccatgagggcttatagctcagctggttagagcgcacgcctgataagcgtgaggtcgatggttcgagtccatttaagcccaccaatgttctttgaaaattgcatataatttaatgtatataaaatacaacaaagccaagaaatatattctttgtgaatgattaatataaccagttttgtactaacaaaacttaaaaggtcaagctacaaagggcgcatggtgaatgccttggcatcaggagccgatgaaggacgcgataagctgcgataagcttcgggtagacgcacatagtcagagatccgaagatttccgaatgagg

SEQ ID NO: 267 - DNA, 620 bp, Clostridium beijerinckii
gtgttatatatggacagtttaatctataattttcttagattaaatatacttaaaataaatgctttaaatcctcatgttcttcaaacccgcatgtttcctataaatatttttatatttaaatatttaaatatgtttatataaaactagatacctataaatatatatttctatataaatatttttctatgtattgattctagtatagttttatggacacattcctgaaataaattataattaaagtaagagaggcgtgtctgaatgagagggaagagttatgcataagattttaagcaaatgataatcgaggtatataacactaaaaaaaatgaaaaaatagaaatagaatttgtgtgaaaatttccaatttagcttgtaacgcaaaaagcggtgacatgctaaattggatacaacttgcaacttagggatttcagctatgtttccatagtcttccgaattattatgacccttggggttacagaaatatttattgtttggtaagtagactagggaatcacttccctaacccctctcagaaccgtacgtgcggatttcccgcatacggctccccacattataattcacagtatatatgatatatcttcttttaagttgaaaat

SEQ ID NO: 268 - DNA, 546 bp, Clostridium beijerinckii
gaacacattaaagaagcaaatgaaatgggagtaatatgtggtgtaacaacaaatccatcattaatagcaaaagaaggaagagacttcaatgaagtaataaaagaaattacagaaatagttgatggaccaataagtggagaagttgtaagtgaagatgctgaaggaatgataaaagaaggaagagaaattgcagcaattcataagaatatgatagtaaagattccaatgacagctgaaggattaaaggcaactaaagtattagctagtgaaggaattaaaacaaatgtaacattaatattctcagcaacacaagctttacttgcagcaaatgcaggagcaacatatgtaagcccattccttggaagagtagatgacatctcaatgataggtatggatttagttagagatatagcagaaatatttgcagttcatggaatagaaacagaaataatagcagcaagcgtaagaaatccaattcatgtaatagaagcagcaaaagcaggtgcagatatatcaacagtgccttatagtttagtaatgcaaatg

SEQ ID NO: 269 - DNA, 517 bp, Clostridium beijerinckii
taaagtccgtagcgaagctgtacgtatatttagaaaaataattaaaaattaagaaaagaaatagctaatagcatgaaaaactaactttcttatgttattaactatatctatgaataattcaggtttacattagtaactttccacttaaaatgatttttatgctaagtaataatttataaaaaatattaaattatctgctttataaattttacttatcttcggtttgcttatcatatgctataaggcatactggaggattatggtgttcatttattctgttttccatttgtcttatgaaatatatatcttctgtagataaatcactgaattcattatcaaatttactgctatcattactcatgctatcactcctttcataagtatagtatgtaggcgtttgcgaaacgccgcaacccgcagaaatgcgggatatttttttagcaaaataaaataactcctcactgatttatggtaaaattgaattgcctaaaaacaaaactaccatatacctcagaaa

SEQ ID NO: 270 - DNA, 512 bp, Clostridium beijerinckii
atttctgctttacctgatgctccaaaagtatctaaagatataacatctccatcaagacctacatatttgtgccatccaaagcttgttaatgcttctactgcaactctagcacgaactttatttggcataactgattctttatagctttcgtcttgagcatcgaataattcaaatgatggcatactgataactcttgcatctatacctttagcttctaattcagctgctgctttgtagattaattctacttctgatcctgatgccattaaaagtacatctggagtttctttcttagaatcttttaagatatatcctccctttaatgctctcttaggacagccatcatatagtggtaacttttgtcttgttaatactagtgatgttggagtagttccattagtcacagcgtaataccatgctgctgcagtttcttttgagtctgctggtctaaatactgtcatatttggcatacttctaagagctgctaattgttctattggttcatgagttgg
